(19) United States
(12) Patent Application Publication
(10) Pub. No.: US 2018/0237787 A1
(43) Pub. Date: Aug. 23, 2018

(54) GENE EDITING OF PCSK9

(71) Applicant: President and Fellows of Harvard College, Cambridge, MA (US)

(72) Inventors: Juan Pablo Maianti, Revere, MA (US); David R. Liu, Lexington, MA (US)

(21) Appl. No.: 15/852,526

(22) Filed: Dec. 22, 2017

Related U.S. Application Data
(60) Provisional application No. 62/438,869, filed on Dec. 23, 2016.

(51) Int. Cl. C12N 15/74; C12N 15/113; C12N 15/10; C12N 9/22; C12N 15/85; C12N 15/90

(52) U.S. Cl. CPC C12N 15/74; C12N 15/113; C12N 15/1082; C12N 9/22; C12N 2310/531; C12N 15/907; C12N 15/102; C12N 2310/20; C12N 2310/3519; C12N 15/8509

(57) ABSTRACT

Provided herein are systems, compositions, and methods of introducing loss-of-function mutations in to protein factors involved in the LDL-R-mediated cholesterol clearance pathway, e.g., PCSK9, APOC3, LDL-R, or IDOL. Loss-of-function mutations may be introduced using a CRISPR/Cas9-based nucleobase editor described in. Further provided herein are compositions and methods of treating conditions related to high circulating cholesterol levels.

### RELATED APPLICATIONS

[0001] This application claims priority under 35 U.S.C. § 119(e) to U.S. Provisional Application Ser. No. 62/438,869, filed Dec. 23, 2016, which is incorporated herein by reference.

### GOVERNMENT SUPPORT

[0002] This invention was made with government support under grant number GM065865, awarded by the National Institutes of Health (NIH). The government has certain rights in the invention.

### BACKGROUND OF THE INVENTION

[0003] The liver protein Proprotein Convertase Subtilisin/Kexin Type 9 (PCSK9) is a secreted, globular, auto-activating serine protease that acts as a protein-binding adaptor within endosomal vesicles to bridge a pH-dependent interaction with the low-density lipoprotein receptor (LDL-R) during endocytosis of LDL particles, preventing recycling of the LDL-R to the cell surface and leading to reduction of LDL-cholesterol clearance. Blocking or inhibiting the function of PCSK9 to boost LDL-R-mediated clearance of LDL cholesterol has been of significant interest in the pharmaceutical industry. However, current methods of generating PCSK9 protective variants and loss-of-function mutants in vivo have been ineffective due to the large number of cells that need to be modified to modulate cholesterol levels. Other concerns involve off-target effects, genome instability, or oncogenic modifications that may be caused by genome editing.

### SUMMARY OF THE INVENTION

[0004] Provided herein are systems, compositions, kits, and methods for modifying a polynucleotide (e.g., DNA) encoding a PCSK9 protein to produce loss-of-function PCSK9 variants. Also provided herein are systems, compositions, kits, and methods for modifying a polynucleotide (e.g., DNA) encoding a LDLR, IDOL, or APOC3/C5 protein to produce loss-of-function mutants. The methodology for producing the mutatns relies on CRISPR/Cas9-based base-editing technology. The precise targeting methods described herein are superior to previously proposed strategies that create random indels in the PCSK9 genomic locus or other loci described herein using engineered nucleases. The methods also have a more favorable safety profile, due to the low probability of off-target effects. Thus, the base editing methods described herein have low impact on genomic stability, including oncogene activation or tumor suppressor inactivation. In some embodiments, the loss-of-function variants (e.g., PCSK9, LDLR, IDOL, or APOC3/C5 variants) generated using the methods described herein have a cardioprotective function. In some embodiments, the loss-of-function variants (e.g., PCSK9, LDLR, IDOL, or APOC3/C5 variants) generated using the methods described herein reduce LDL levels. In some embodiments, the loss-of-function variants (e.g., PCSK9, LDLR, IDOL, or APOC3/C5 variants) generated using the methods described herein reduce LDL cholesterol levels. In some embodiments, the loss-of-function variants (e.g., PCSK9, LDLR, IDOL, or APOC3/C5 variants) generated using the methods described herein lower overall cholesterol levels. In some embodiments, the loss-of-function variants (e.g., PCSK9, LDLR, IDOL, or APOC3/C5 variants) generated using the methods described herein increase HDL levels.

[0005] Some aspects of the present disclosure provide methods of editing a polynucleotide encoding a Proprotein Convertase Subtilisin/Kexin Type 9 (PCSK9) protein, the method comprising contacting the PCSK9-encoding polynucleotide with (i) a fusion protein comprising: (a) a guide nucleotide sequence-programmable DNA binding protein domain; and (b) a cytosine deaminase domain; and (ii) a guide nucleotide sequence targeting the fusion protein of (i) to a target cytosine (C) base in the PCSK9-encoding polynucleotide, wherein the contacting results in deamination of the target C base by the fusion protein, resulting in a cytosine (C) to thymine (T) change in the PCSK9-encoding polynucleotide.

[0006] In some embodiments, the guide nucleotide sequence-programmable DNA binding protein domain is selected from the group consisting of nuclease inactive Cas9 (dCas9) domains, nuclease inactive Cpf1 domains, nuclease inactive Argonaute domains, and variants and combinations thereof. In some embodiments, the guide nucleotide sequence-programmable DNA-binding protein domain is a nuclease inactive Cas9 (dCas9) domain. In some embodiments, the amino acid sequence of the dCas9 domain comprises mutations corresponding to a D10A and/or H840A mutation in SEQ ID NO: 1. In some embodiments, a Cas9 nickase is used. In some embodiments, the amino acid sequence of the Cas9 nickase comprises a mutation corresponding to a D10A mutation in SEQ ID NO: 1, and wherein the dCas9 domain comprises a histidine at the position corresponding to amino acid 840 of SEQ ID NO: 1.

[0007] In some embodiments, the guide nucleotide sequence-programmable DNA-binding protein domain comprises a nuclease inactive Cpf1 (dCpf1) domain. In some embodiments, the dCpf1 domain is from a species of Acidaminococcus or Lachnospiraceae.

[0008] In some embodiments, the guide nucleotide sequence-programmable DNA-binding protein domain comprises a nuclease inactive Argonaute (dAgo) domain. In some embodiments, the dAgo domain is from Natronobacterium gregoryi (dNgAgo).

[0009] As a set of non limiting examples, any of the fusion proteins described herein that include a Cas9 domain can use another guide nucleotide sequence-programmable DNA binding protein, such as CasX, CasY, Cpf1, C2c1, C2c2, C2c3, and Argonaute, in place of the Cas9 domain. These may be nuclease inactive variants of the proteins. Guide nucleotide sequence-programmable DNA binding protein include, without limitation, Cas9 (e.g., dCas9 and nCas9), saCas9 (e.g., saCas9d, saCas9n, saKKH Cas9), CasX, CasY, Cpf1, C2c1, C2c2, C2C3, Argonaute, and any of suitable protein described herein. In some embodiments, the fusion protein described herein comprises a Gam protein, a guide nucleotide sequence-programmable DNA binding protein, and a cytidine deaminase domain.

[0010] In some embodiments, the cytosine deaminase domain comprises an apolipoprotein B mRNA-editing complex (APOBEC) family deaminase. In some embodiments, the cytosine deaminase is selected from the group consisting of APOBEC1 deaminase, APOBEC2 deaminase, APOBEC3A deaminase, APOBEC3B deaminase, APOBEC3C deaminase, APOBEC3D deaminase, APOBEC3F deaminase, APOBEC3G deaminase, APOBEC3H deaminase, APOBEC4 deaminase, activation-induced deaminase (AID), and pmCDA1. In some embodiments, the cytosine deaminase comprises the amino acid sequence of any one of SEQ ID NOs: 271-292 and 303.

[0011] In some embodiments, the fusion protein of (a) further comprises a uracil glycosylase inhibitor (UGI) domain. In some embodiments, the cytosine deaminase domain is fused to the N-terminus of the guide nucleotide sequence-programmable DNA-binding protein domain. In some embodiments, the UGI domain is fused to the C-terminus of the guide nucleotide sequence-programmable DNA-binding protein domain.

[0012] In some embodiments, the cytosine deaminase is fused to the guide nucleotide sequence-programmable DNA-binding protein domain via an optional linker. In some embodiments, the UGI domain is fused to the dCas9 domain via an optional linker. In some embodiments, the fusion protein comprises the structure NH₂-[cytosine deaminase domain]-[optional linker sequence]-[guide nucleotide sequence-programmable DNA-binding protein domain]-[optional linker sequence]-[UGI domain]-COOH.

[0013] In some embodiments, the linker comprises (GGGS)ₙ (SEQ ID NO: 1998), (GGGGS)ₙ (SEQ ID NO: 308), (G)ₙ, (EAAAK)ₙ (SEQ ID NO: 309), (GGS)ₙ, SGSETPGTSESATPES (SEQ ID NO: 310), or (XP)ₙ motif, or a combination of any of these, wherein n is independently an integer between 1 and 30, and wherein X is any amino acid. In some embodiments, the linker comprises the amino acid sequence SGSETPGTSESATPES (SEQ ID NO: 310). In some embodiments, the linker is (GGS)ₙ, wherein n is 1, 3, or 7.

[0014] In some embodiments, the fusion protein comprises the amino acid sequence of any one of SEQ ID NOs: 10 and 293-302.

[0015] In some embodiments, the polynucleotide encoding the PCSK9 protein comprises a coding strand and a complementary strand. In some embodiments, the polynucleotide encoding the PCSK9 protein comprises a coding region and a non-coding region.

[0016] In some embodiments, the C to T change occurs in the coding sequence or on the coding strand of the PCSK9-encoding polynucleotide. In some embodiments, the C to T change leads to a mutation in the PCSK9 protein. In some embodiments, the mutation in the PCSK9 protein is a loss-of-function mutation. In some embodiments, the mutation is selected from the mutations listed in Table 3. In some embodiments, the guide nucleotide sequence useful in the present invention is selected from the guide nucleotide sequences listed in Table 3.

[0017] In some embodiments, the loss-of-function mutation introduces a premature stop codon in the PCSK9 coding sequence that leads to a truncated or non-functional PCSK9 protein. In some embodiments, the premature stop codon is TAG (Amber), TGA (Opal), or TAA (Ochre).

[0018] In some embodiments, the premature stop codon is generated from a CAG to TAG change via the deamination of the first C on the coding strand. In some embodiments, the premature stop codon is generated from a CGA to TGA change via the deamination of the first C on the coding strand. In some embodiments, the premature stop codon is generated from a CAA to TAA change via the deamination of the first C on the coding strand. In some embodiments, the premature stop codon is generated from a TGG to TAG change via the deamination of the second C on the complementary strand. In some embodiments, the premature stop codon is generated from a TGG to TGA change via the deamination of the third C on the complementary strand. In some embodiments, the premature stop codon is generated from a CGG to TAG or CGA to TAA change via the deamination of C on the coding strand and the deamination of C on the complementary strand. In some embodiments, the guide nucleotide sequence is selected from the guide nucleotide sequences listed in Table 6 (SEQ ID NO: 938-1123).

[0019] In some embodiments, tandem premature stop codons are introduced. In some embodiments, the mutation is selected from the group consisting of: W10X-W11X, Q99X-Q101X, Q342X-Q344X, and Q554X-Q555X, wherein X is a stop codon. The guide nucleotide sequences for the consecutive mutations may be found in Table 6.

[0020] In some embodiments, the premature stop codon is introduced after a structurally destabilizing mutation. In some embodiments, the mutation is selected from the group consisting of: P530S/L-Q531X, P581S/L-R582X, and P618S/L-Q619X, wherein X is a stop codon. In some embodiments, the guide nucleotide sequence used for introducing the premature stop codon is selected from SEQ ID NOs: 938-1123, and wherein the guide nucleotide sequence used for introducing the structurally destabilizing mutation is selected from SEQ ID NOs: 579-937. In some embodiments, the mutation destabilizes PCSK9 protein folding.

[0021] In some embodiments, mutation is selected from the mutations listed in Table 4. In some embodiments, the guide nucleotide sequence is selected from the guide nucleotide sequences listed in Table 4 (SEQ ID NOs.: 579-937).

[0022] In some embodiments, the C to T change occurs at a splicing site in the non-coding region of the PCSK9-encoding polynucleotide. In some embodiments, the C to T change occurs at an intron-exon junction. In some embodiments, the C to T change occurs at a splicing donor site. In some embodiments, the C to T change occurs at a splicing acceptor site. In some embodiments, the C to T changes occurs at a C base-paired with the G base in a start codon (AUG). In some embodiments, the C to T change prevents PCSK9 mRNA maturation or abrogates PCSK9 expression. In some embodiments, the guide nucleotide sequence is selected from the guide nucleotide sequences listed in Table 8 (SEQ ID NOs: 1124-1309).

[0023] In some embodiments, a PAM sequence is located 3′ of the C being changed, e.g., aPAM selected from the group consisting of: NGG, NGAN, NGNG, NGAG, NGCG, NNGRRT, NGRRN, NNNRRT, NGGNG, NNNGATT, NNAGAA, and NAAAC, wherein Y is pyrimidine, R is purine, and N is any nucleobase. In some embodiments a PAM sequence is located 5′ of the C being change, e.g., a PAM selected from the group consisting of: NNT, NNNT, and YNT, wherein Y is pyrimidine, and N is any nucleobase. In some embodiments, no PAM sequence is located at either 5′ or 3′ of the target C base.

[0024] In some embodiments, at least 1, 2, 3, 4, 5, 6, 7, 8, 9, or 10 mutations are introduced into the PCSK9-encoding polynucleotide.

[0025] In some embodiments, the guide nucleotide sequence is RNA (guide RNA or gRNA). In some embodiments, the guide nucleotide sequence is ssDNA (guide DNA or gDNA).

[0026] Other aspects of the present disclosure provide methods of editing a polynucleotide encoding an Apolipoprotein C3 (APOC3) protein, the method comprising contacting the APOC3-encoding polynucleotide with: (i) a fusion protein comprising: (a) a guide nucleotide sequence-programmable DNA binding protein domain; and (b) a cytosine deaminase domain; and (ii) a guide nucleotide sequence targeting the fusion protein of (i) to a target cytosine (C) base in the APOC3-encoding polynucleotide, wherein the contacting results in deamination of the target C base by the fusion protein, resulting in a cytosine (C) to thymine (T) change in the APOC3-encoding polynucleotide. In some embodiments, the guide nucleotide sequence is selected from SEQ ID NOs: 1806-1906.

[0027] Other aspects of the present disclosure provide methods of editing a polynucleotide encoding a Low-Density Lipoprotein Receptor (LDL-R) protein, the method comprising contacting the LDL-R-encoding polynucleotide with: (i) a fusion protein comprising: (a) a guide nucleotide sequence-programmable DNA binding protein domain; and (b) a cytosine deaminase domain; and (ii) a guide nucleotide sequence targeting the fusion protein of (i) to a target cytosine (C) base in the LDL-R-encoding polynucleotide, wherein the contacting results in deamination of the target C base by the fusion protein, resulting in a cytosine (C) to thymine (T) change in the LDLR-encoding polynucleotide. In some embodiments, the guide nucleotide sequence is selected from SEQ ID NOs: 1792-1799.

[0028] Other aspects of the present disclosure provide methods of editing a polynucleotide encoding an Inducible Degrader of the LDL receptor (IDOL) protein, the method comprising contacting the IDOL-encoding polynucleotide with: (i) a fusion protein comprising: (a) a guide nucleotide sequence-programmable DNA binding protein domain; and (b) a cytosine deaminase domain; and (ii) a guide nucleotide sequence targeting the fusion protein of (i) to a target C base in the IDOL-encoding polynucleotide, wherein the contacting results in deamination of the target C base by the fusion protein, resulting in a cytosine (C) to thymine (T) change in the IDOL-encoding polynucleotide. In some embodiments, the guide nucleotide sequence is selected from SEQ ID NOs: 1788-1791.

[0029] In some embodiments, the method is carried out in vitro. In some embodiments, the method is carried out in a cultured cell. In some embodiments, the method is carried out in vivo. In some embodiments, the method is carried out ex vivo.

[0030] In some embodiments, the method is carried out in a mammal. In some embodiments, wherein the mammal is a rodent. In some embodiments, the mammal is a primate. In some embodiments, the mammal is human. In some embodiments, the method is carried out in an organ of a subject, e.g., liver.

[0031] Other aspects of the present disclosure provide methods of editing a polynucleotide encoding a Proprotein Convertase Subtilisin/Kexin Type 9 (PCSK9) protein, the method comprising contacting the PCSK9-encoding polynucleotide with a fusion protein comprising: (a) a programmable DNA binding protein domain; and (b) a deaminase domain, wherein the contacting results in deamination of the target base by the fusion protein, resulting in base change in the PCSK9-encoding polynucleotide.

[0032] In some embodiments, the programmable DNA-binding domain comprises a zinc finger nuclease (ZFN) domain. In some embodiments, the programmable DNA-binding domain comprises a transcription activator-like effector (TALE) domain. In some embodiments, the programmable DNA-binding domain is a guide nucleotide sequence-programmable DNA binding protein domain.

[0033] In some embodiments, the programmable DNA-binding domain is selected from the group consisting of: nuclease inactive Cas9 domains (e.g., dCas9 and nCas9), nuclease inactive Cpf1 domains, nuclease inactive Argonaute domains, and variants thereof. In some embodiments, the programmable DNA-binding domain is a CasX, CasY, C2c1, C2c2, or C2c3 domain, or variants thereof. In some embodiments, the programmable DNA-binding domain is a saCas9 (e.g., saCas9d, saCas9n, saKKH Cas9) domain, or variants thereof. In some embodiments, the programmable DNA-binding domain is associated with a guide nucleotide sequence. In some embodiments, the deaminase is a cytosine deaminase. In some embodiments, the target base is a cytosine (C) base and the deamination of the target C base results in a C to deoxyuridine (dU) change, which precedes the introduction of thymine (T) in place of the target C. In some embodiments, the fusion protein described herein comprises a Gam protein, a guide nucleotide sequence-programmable DNA-binding domain, and a cytidine deaminase domain.

[0034] Some aspects of the present disclosure provide compositions comprising: (i) a fusion protein comprising: (a) a guide nucleotide sequence-programmable DNA binding protein domain; and (b) a cytosine deaminase domain; and (ii) a guide nucleotide sequence targeting the fusion protein of (i) to a polynucleotide encoding a Proprotein Convertase subtilisin/Kexin Type 9 (PCSK9) protein. In some embodiments, the fusion protein of (i) further comprises a Gam protein.

[0035] Other aspects of the present disclosure provide compositions comprising: (i) a fusion protein comprising: (a) a guide nucleotide sequence-programmable DNA binding protein domain; and (b) a cytosine deaminase domain; (ii) a guide nucleotide sequence targeting the fusion protein of (i) to a polynucleotide encoding a Proprotein Convertase subtilisin/Kexin Type 9 (PCSK9) protein; and (ii) a guide nucleotide sequence targeting the fusion protein of (i) to a polynucleotide encoding an Apolipoprotein C3 protein. In some embodiments, the fusion protein of (i) further comprises a Gam protein.

[0036] Other aspects of the present disclosure provide compositions comprising: (i) a fusion protein comprising: (a) a guide nucleotide sequence-programmable DNA binding protein domain; and (b) a cytosine deaminase domain; (ii) a guide nucleotide sequence targeting the fusion protein of (i) to a polynucleotide encoding a Proprotein Convertase subtilisin/Kexin Type 9 (PCSK9) protein; (iii) a guide nucleotide sequence targeting the fusion protein of (i) to a polynucleotide encoding an Apolipoprotein C3 protein; and (iv) a guide nucleotide sequence targeting the fusion protein of (i) to a polynucleotide encoding Low-Density Lipoprotein Receptor protein. In some embodiments, the fusion protein of (i) further comprises a Gam protein.

[0037] Other aspects of the present disclosure provide compositions comprising: (i) a fusion protein comprising (a) a guide nucleotide sequence-programmable DNA binding protein domain; and (b) a cytosine deaminase domain; a guide nucleotide sequence targeting the fusion protein of (i) to a polynucleotide encoding a Proprotein Convertase subtilisin/Kexin Type 9 (PCSK9) protein; in some embodiments, a guide nucleotide sequence targeting the fusion protein of (i) to a polynucleotide encoding an Apolipoprotein C3 protein; in some embodiments, a guide nucleotide sequence targeting the fusion protein of (i) to a polynucleotide encoding Low-Density Lipoprotein Receptor protein; and in some embodiments, a guide nucleotide sequence targeting the fusion protein of (i) to a polynucleotide encoding Inducible Degrader of the LDL receptor protein. In some embodiments, the fusion protein of (i) further comprises a Gam protein.

[0038] In some embodiments, the guide nucleotide sequence of (ii) is selected from SEQ ID NOs: 336-1309. In some embodiments, the guide nucleotide sequence of (iii) is selected from SEQ ID NOs: 1806-1906. In some embodiments, the guide nucleotide sequence of (iv) is selected from SEQ ID NOs: 1792-1799. In some embodiments, the guide nucleotide sequence of (v) is selected from SEQ ID NOs: 1788-1791.

[0039] Other aspects of the present disclosure provide compositions comprising a nucleic acid encoding the fusion protein and the guide nucleotide sequence described herein. In some embodiments, the composition further comprising a pharmaceutically acceptable carrier.

[0040] Other aspects of the present disclosure provide methods of boosting LDL receptor-mediated clearance of LDL cholesterol, the method comprising administering to a subject in need thereof a therapeutically effective amount of the composition described herein.

[0041] Other aspects of the present disclosure provide methods of reducing circulating cholesterol level in a subject, the method comprising administering to a subject in need thereof an therapeutically effective amount of the composition described herein.

[0042] Other aspects of the present disclosure provide methods of treating a condition, the method comprising administering to a subject in need thereof an therapeutically effective amount of the composition described herein. In some embodiments, the condition is hypercholesterolemia, elevated total cholesterol levels, elevated low-density lipoprotein (LDL) levels, elevated LDL-cholesterol levels, reduced high-density lipoprotein levels, liver steatosis, coronary heart disease, ischemia, stroke, peripheral vascular disease, thrombosis, type 2 diabetes, high elevated blood pressure, atherosclerosis, obesity, Alzheimer's disease, neurodegeneration, or a combination thereof.

[0043] Further provided herein are kits comprising the compositions described herein.

[0044] The details of certain embodiments of the invention are set forth in the Detailed Description of Certain Embodiments, as described below. Other features, objects, and advantages of the invention will be apparent from the Definitions, Examples, Figures, and Claims.

### BRIEF DESCRIPTION OF THE DRAWINGS

[0045] The accompanying drawings, which constitute a part of this specification, illustrate several embodiments of the invention and together with the description, serve to explain the principles of the invention.

[0046] FIG. 1A depicts a pre-pro-PCSK9 open-reading frame showing naturally-occurring gain-of-function (GOF) variants identified in human populations associated with elevated low-density lipoproteins (LDL) cholesterol, leading to increased LDL receptor (LDL-R) degradation, and other variants that display beneficial loss-of-function (LOF) phenotypes associated with lower LDL cholesterol and cardioprotection. Variants highlighted in red have been mechanistically confirmed. Key catalytic site residues are shown.^{3b}

[0047] FIG. 1B is a model of uncleaved pro-Proprotein Convertase Subtilisin/Kexin Type 9 (PCSK9) (based on PDB: 1R6V) showing the position of the catalytic triad residues (Asp186, His226, and Ser386) and selected residues that produce GOF (S127R, F216L, D374Y) or LOF variants (R46L, ΔR97, L253F, A433T) affecting PCSK9 proteolytic auto-activation, protease inactivation, or LDL-R binding affinity (see Tables 1 and 2).

[0048] FIG. 1C shows interactions between PCSK9 and the EGF-A domain of LDL-R observed in the X-ray co-structure (PDB: 3BPS).¹⁹

[0049] FIG. 2 is a scheme of the basic functions of PCSK9 in hepatocyte cells preventing LDL-R recycling to the cell surface after endocytosis of LDL. Multiple strategies for blocking PCSK9 function are being explored in the pharma sector (Table 12), including two FDA approved anti-PCSK9 antibody therapeutics, other antibodies in phase 2-3, and in pre-clinical phases: adnectin, peptides, small-molecules, antisense oligos, and RNA-interference.

[0050] FIG. 3A shows a strategy for preventing PCSK9 mRNA maturation and protein production by altering splicing sites: donor site, branch-point, or acceptor sites.

[0051] FIGS. 3B to 3D show consensus sequences of the human spliceosomal intron branch-point, donor and acceptor sites, suggesting that the guanosine of the donor and acceptor sites is an excellent target for base-editing of C→T reactions on the complementary strand.

[0052] FIG. 4 shows protein and open-reading frame sequences for PCSK9. Residues highlighted in grey correspond to Table 4 (premature stop codons), or Table 5 (destabilizing variants). The top level nucleotide sequence in this figure depicts SEQ ID NO: 1990. The second level amino acid sequence in this figure depicts SEQ ID NO: 1991.

[0053] FIG. 5 is a PCSK9 genomic sequence showing exons (capitalized) and introns (lowercase). Key nucleotides in the exon/intron junctions are underlined. This figure depicts SEQ ID NO: 1994.

[0054] FIG. 6 is a graph showing the numbering schemes of the relative location of PAM and the target sequence. This figure depicts SEQ ID NO: 1995.

### DEFINITIONS

[0055] As used herein and in the claims, the singular forms “a,” “an,” and “the” include the singular and the plural reference unless the context clearly indicates otherwise. Thus, for example, a reference to “an agent” includes a single agent and a plurality of such agents.

[0056] “Cholesterol” refers to a lipid molecule biosynthesized by all animal cells. Not wishing to be bound to a specific theory, cholesterol is an essential structural component of all animal cell membranes that is required to maintain both membrane structural integrity and fluidity. Cholesterol enables animal cells to dispense with a cell wall (to protect membrane integrity and cell viability) thus allowing animal cells to change shape and animals to move (unlike bacteria and plant cells which are restricted by their cell walls). In addition to its importance for animal cell structure, cholesterol also serves as a precursor for the biosynthesis of steroid hormones and bile acids. Cholesterol is the principal sterol synthesized by all animals. In vertebrates the hepatic cells typically produce greater amounts than other cells. It is generally absent among prokaryotes (bacteria and archaea).

[0057] All animal cells manufacture cholesterol, for both membrane structure and other uses, with relative production rates varying by cell type and organ function. About 20% of total daily cholesterol production occurs in the liver; other sites of higher synthesis rates include the intestines, adrenal glands, and reproductive organs. The liver excretes cholesterol into biliary fluids, which is then stored in the gallbladder. Bile contains bile salts, which solubilize fats in the digestive tract and aid in the intestinal absorption of fat molecules as well as the fat-soluble vitamins, A, D, E, and K. Cholesterol is recycled in the body. Typically, about 50% of the excreted cholesterol by the liver is reabsorbed by the small bowel back into the bloodstream.

[0058] As an isolated molecule, cholesterol is only minimally soluble in water; it dissolves into the (water-based) bloodstream only at small concentrations. Instead, cholesterol is transported within lipoproteins, complex discoidal particles with exterior amphiphilic proteins and lipids, whose outward-facing structures are water-soluble and inward-facing surfaces are lipid-soluble; i.e. transport via emulsification. The lipoprotein particles are classified based on their density: low-density lipoproteins (LDL), very low-density lipoproteins (VLDL), high-density lipoproteins (HDL), chylomicrons, etc. Triglycerides and cholesterol esters are carried internally. Phospholipids and cholesterol, being amphipathic, are transported in the monolayer surface of the lipoprotein particle.

[0059] Surface LDL receptors are internalized during the process of cholesterol absorption, and its synthesis is regulated by SREBP, the same protein that controls the synthesis of cholesterol de novo, according to its concentration inside the cell. A cell with abundant cholesterol will have its LDL receptor synthesis blocked, to prevent new cholesterol in LDL particles from being taken up. Conversely, LDL receptor synthesis is promoted when a cell is deficient in cholesterol.

[0060] Not wishing to be bound to any specific theory, if this physiological process becomes unregulated, excess LDL particles will travel in the blood without the opportunity for uptake by an LDL receptor. These LDL particles are oxidized and taken up by macrophages through scavenger receptors, which then become engorged and form foam cells. These foam cells often become trapped in the walls of blood vessels and contribute to atherosclerotic plaque formation. Differences in cholesterol homeostasis affect the development of early atherosclerosis (carotid intima-media thickness). These plaques are the main causes of heart attacks, strokes, and other serious medical problems, leading to the association of so-called LDL cholesterol (actually a lipoprotein) with “bad” cholesterol.

[0061] “Proprotein convertase subtilisin/kexin type 9 (PCSK9)” refers to an enzyme encoded by the PCSK9 gene in humans. PCSK9 binds to the receptor for low-density lipoprotein (LDL) particles. In the liver, the LDL receptor removes LDL particles from the blood through the endocytosis pathway. When PCSK9 binds to the LDL receptor, the receptor is channeled towards the lysosomal pathway and broken down by proteolytic enzymes, limiting the number of times that a given LDL receptor is able to uptake LDL particles from the blood. Thus, blocking PCSK9 activity may lead to more LDL receptors being recycled and present on the surface of the liver cells, and will remove more LDL cholesterol from the blood. Therefore, blocking PCSK9 can lower blood cholesterol levels. PCSK9 orthologs are found across many species. PCSK9 is inactive when first synthesized, a pre-pro enzyme, because a section of the peptide chain blocks its activity; proprotein convertases remove that section to activate the enzyme. Pro-PCSK9 is a secreted, globular, serine protease capable of proteolytic auto-processing of its N-terminal pro-domain into a potent endogenous inhibitor of PCSK9, which blocks its catalytic site. PCSK9's role in cholesterol homeostasis has been exploited medically. Drugs that block PCSK9 can lower the blood level of low-density lipoprotein cholesterol (LDL-C). The first two PCSK9 inhibitors, alirocumab and evolocumab, were approved by the U.S. Food and Drug Administration in 2015 for lowering cholesterol where statins and other drugs were insufficient.

[0062] “Low-density lipoprotein (LDL)” refers to one of the five major groups of lipoprotein, from least dense (lower weight-volume ratio particles) to most dense (larger weight-volume ratio particles): chylomicrons, very low-density lipoproteins (VLDL), low-density lipoproteins (LDL), intermediate-density lipoproteins (IDL), and high-density lipoproteins (HDL). Lipoproteins transfer lipids (fats) around the body in the extracellular fluid thereby facilitating fats to be available and taken up by the cells body wide via receptor-mediated endocytosis. Lipoproteins are complex particles composed of multiple proteins, typically 80-100 proteins/particle (organized by a single apolipoprotein B for LDL and the larger particles). A single LDL particle is about 220-275 angstroms in diameter, typically transporting 3,000 to 6,000 fat molecules/particle, varying in size according to the number and mix of fat molecules contained within. The lipids carried include all fat molecules with cholesterol, phospholipids, and triglycerides dominant; amounts of each varying considerably. Lipoproteins can be sampled from blood.

[0063] Not wishing to be bound to any specific theory, LDL particles pose a risk for cardiovascular disease when they invade the endothelium and become oxidized, since the oxidized forms are more easily retained by the proteoglycans. A complex set of biochemical reactions regulates the oxidation of LDL particles, mainly stimulated by presence of necrotic cell debris and free radicals in the endothelium. Increasing concentrations of LDL particles are strongly associated with increasing rates of accumulation of atherosclerosis within the walls of arteries over time, eventually resulting in sudden plaque ruptures, decades later, and triggering clots within the artery opening, or a narrowing or closing of the opening, i.e. cardiovascular disease, stroke, and other vascular disease complications.

[0064] “Low-Density Lipoprotein (LDL) Receptor” refers to a mosaic protein of 839 amino acids (after removal of 21-amino acid signal peptide) that mediates the endocytosis of cholesterol-rich LDL particles. It is a cell-surface receptor that recognizes the apoprotein B100, which is embedded in the outer phospholipid layer of LDL particles. The receptor also recognizes the apoE protein found in chylomicron remnants and VLDL remnants (IDL). In humans, the LDL receptor protein is encoded by the LDLR gene. LDL receptor complexes are present in clathrin-coated pits (or buds) on the cell surface, which when bound to LDL-cholesterol via adaptin, are pinched off to form clathrin-coated vesicles inside the cell. This allows LDL-cholesterol to be bound and internalized in a process known as endocytosis. This process occurs in all nucleated cells, but mainly in the liver which removes ˜70% of LDL from the circulation.

[0065] “Inducible Degrader of the LDL receptor (IDOL)” refers to an ubiquitin ligase that ubiquitinates LDL receptors in endosomes and directs the receptors to the lysosomal compartment for degradation. IDOL is transcriptionally up-regulated by LXR/RXR in response to an increase in intracellular cholesterol. Pharmacologic inhibition of IDOL could reduce plasma LDL cholesterol by increasing plasma LDL receptor density.

[0066] “Apolipoprotein C-III (APOC3)” is a protein that in humans is encoded by the APOC3 gene. APOC3 is a component of very low density lipoproteins (VLDL). APOC3 inhibits lipoprotein lipase and hepatic lipase. It is also thought to inhibit hepatic uptake of triglyceride-rich particles. An increase in APOC3 levels induces the development of hypertriglyceridemia. Recent evidence suggests an intracellular role for APOC3 in promoting the assembly and secretion of triglyceride-rich VLDL particles from hepatic cells under lipid-rich conditions. However, two naturally occurring point mutations in human apoC3 coding sequence, A23T and K58E have been shown to abolish the intracellular assembly and secretion of triglyceride-rich VLDL particles from hepatic cells.

[0067] The term “Gam protein,” as used herein, refers generally to proteins capable of binding to one or more ends of a double strand break of a double stranded nucleic acid (e.g., double stranded DNA). In some embodiments, the Gam protein prevents or inhibits degradation of one or more strands of a nucleic acid at the site of the double strand break. In some embodiments, a Gam protein is a naturally-occurring Gam protein from bacteriophage Mu, or a non-naturally occurring variant thereof.

[0068] The term “loss-of-function mutation” or “inactivating mutation” refers to a mutation that results in the gene product having less or no function (being partially or wholly inactivated). When the allele has a complete loss of function (null allele), it is often called an amorphic mutation in the Muller's morphs schema. Phenotypes associated with such mutations are most often recessive. Exceptions are when the organism is haploid, or when the reduced dosage of a normal gene product is not enough for a normal phenotype (this is called haploinsufficiency).

[0069] The term “protective mutation” or “protective variant” refers to a mutation that results in a gene product having an opposing effect or function to the wild type gene. This is often called an antimorphic mutation in the Muller's morphs schema. Phenotypes associated with such mutations are most often dominant. Exceptions are when the organism is haploid, or when the reduced dosage of the antimorphic gene product is not enough to override the wild type phenotype.

[0070] The term “gain-of-function mutation” or “activating mutation” refers to a mutation that changes the gene product such that its effect gets stronger (enhanced activation) or even is superseded by a different and abnormal function. A gain of function mutation may also be referred to as a neomorphic mutation. When the new allele is created, a heterozygote containing the newly created allele as well as the original will express the new allele, genetically defining the mutations as dominant phenotypes.

[0071] “Hypercholesterolemia,” also called dyslipidemia, is the presence of high levels of cholesterol in the blood. It is a form of high blood lipids and “hyperlipoproteinemia” (elevated levels of lipoproteins in the blood). Elevated levels of non-HDL cholesterol and LDL in the blood may be a consequence of diet, obesity, inherited (genetic) diseases (such as LDL receptor mutations in familial hypercholesterolemia), or the presence of other diseases such as diabetes and an underactive thyroid.

[0072] “Hypocholesterolemia” refers to the presence of abnormally low levels of cholesterol in the blood. Although the presence of high total cholesterol (hyper-cholesterolemia) correlates with cardiovascular disease, a defect in the body's production of cholesterol can lead to adverse consequences as well.

[0073] The term “genome” refers to the genetic material of a cell or organism. It typically includes DNA (or RNA in the case of RNA viruses). The genome includes both the genes, the coding regions, the noncoding DNA, and the genomes of the mitochondria and chloroplasts. A genome does not typically include genetic material that is artificially introduced into a cell or organism, e.g., a plasmid that is transformed into a bacteria is not a part of the bacterial genome.

[0074] A “programmable DNA-binding protein” refers to DNA binding proteins that can be programmed to target to any desired nucleotide sequence within a genome. To program the DNA-binding protein to bind a desired nucleotide sequence, the DNA binding protein may be modified to change its binding specificity, e.g., zinc finger DNA-binding domain, zinc finger nuclease (ZFN), or transcription activator-like effector proteins (TALE). ZFNs are artificial restriction enzymes generated by fusing a zinc finger DNA-binding domain to a DNA-cleavage domain. Zinc finger domains can be engineered to target specific desired DNA sequences and this enables zinc-fingers to bind unique sequences within complex genomes. Transcription activator-like effector nucleases (TALEN) are engineered restriction enzymes that can be engineered to cut specific sequences of DNA. They are made by fusing a TAL effector DNA-binding domain to a nuclease domain (e.g. Fok1). Transcription activator-like effectors (TALEs) can be engineered to bind practically any desired DNA sequence. Methods for programming ZFNs and TALEs are familiar to one skilled in the art. For example, such methods are described in Maeder, et al., Mol. Cell 31 (2): 294-301, 2008; Carroll et al., Genetics Society of America, 188 (4): 773-782, 2011; Miller et al., Nature Biotechnology 25 (7): 778-785, 2007; Christian et al., Genetics 186 (2): 757-61, 2008; Li et al., Nucleic Acids Res. 39 (1): 359-372, 2010; and Moscou et al., Science 326 (5959): 1501, 2009, each of which are incorporated herein by reference.

[0075] A “guide nucleotide sequence-programmable DNA-binding protein” refers to a protein, a polypeptide, or a domain that is able to bind DNA, and the binding to its target DNA sequence is mediated by a guide nucleotide sequence. Thus, it is appreciated that the guide nucleotide sequence-programmable DNA-binding protein binds to a guide nucleotide sequence. The “guide nucleotide” may be an RNA or DNA molecule (e.g., a single-stranded DNA or ssDNA molecule) that is complementary to the target sequence and can guide the DNA binding protein to the target sequence. As such, a guide nucleotide sequence-programmable DNA-binding protein may be a RNA-programmable DNA-binding protein (e.g., a Cas9 protein), or an ssDNA-programmable DNA-binding protein (e.g., an Argonaute protein). “Programmable” means the DNA-binding protein may be programmed to bind any DNA sequence that the guide nucleotide targets. Exemplary guide nucleotide sequence-programmable DNA-binding proteins include, but are not limited to, Cas9 (e.g., dCas9 and nCas9), saCas9 (e.g., saCas9d, saCas9d, saKKH Cas9) CasX, CasY, Cpf1, C2c1, C2c2, C2c3, Argonaute, and any other suitable protein described herein, or variants thereof.

[0076] In some embodiments, the guide nucleotide sequence exists as a single nucleotide molecule and comprises comprise two domains: (1) a domain that shares homology to a target nucleic acid (e.g., and directs binding of a guide nucleotide sequence-programmable DNA-binding protein to the target); and (2) a domain that binds a guide nucleotide sequence-programmable DNA-binding protein. In some embodiments, domain (2) corresponds to a sequence known as a tracrRNA, and comprises a stem-loop structure. For example, in some embodiments, domain (2) is identical or homologous to a tracrRNA as provided in Jinek et al., Science 337:816-821(2012), which is incorporated herein by reference. Other examples of gRNAs (e.g., those including domain 2) can be found in U.S. Patent Application Publication US20160208288 and U.S. Patent Application Publication US20160200779 each of which is herein incorporated by reference.

[0077] Because the guide nucleotide sequence hybridizes to a target DNA sequence, the guide nucleotide sequence-programmable DNA-binding proteins are able to specifically bind, in principle, to any sequence complementary to the guide nucleotide sequence. Methods of using guide nucleotide sequence-programmable DNA-binding protein, such as Cas9, for site-specific cleavage (e.g., to modify a genome) are known in the art (see e.g., Cong, L. et al. Multiplex genome engineering using CRISPR/Cas systems. Science 339, 819-823 (2013); Mali, P. et al. RNA-guided human genome engineering via Cas9. Science 339, 823-826 (2013); Hwang, W. Y. et al. Efficient genome editing in zebrafish using a CRISPR-Cas system. Nature biotechnology 31, 227-229 (2013); Jinek, M. et al. RNA-programmed genome editing in human cells. eLife 2, e00471 (2013); Dicarlo, J. E. et al. Genome engineering in Saccharomyces cerevisiae using CRISPR-Cas systems. Nucleic acids research (2013); Jiang, W. et al. RNA-guided editing of bacterial genomes using CRISPR-Cas systems. Nature biotechnology 31, 233-239 (2013); each of which are incorporated herein by reference).

[0078] As used herein, the term “Cas9” or “Cas9 nuclease” refers to an RNA-guided nuclease comprising a Cas9 protein, a fragment, or a variant thereof. A Cas9 nuclease is also referred to sometimes as a casn1 nuclease or a CRISPR (clustered regularly interspaced short palindromic repeat)-associated nuclease. CRISPR is an adaptive immune system that provides protection against mobile genetic elements (viruses, transposable elements and conjugative plasmids). CRISPR clusters contain spacers, sequences complementary to antecedent mobile elements, and target invading nucleic acids. CRISPR clusters are transcribed and processed into CRISPR RNA (crRNA). In type II CRISPR systems correct processing of pre-crRNA requires a trans-encoded small RNA (tracrRNA), endogenous ribonuclease 3 (rnc) and a Cas9 protein. The tracrRNA serves as a guide for ribonuclease 3-aided processing of pre-crRNA. Subsequently, Cas9/crRNA/tracrRNA endonucleolytically cleaves linear or circular dsDNA target complementary to the spacer. The target strand not complementary to crRNA is first cut endonucleolytically, then trimmed 3′-5′ exonucleolytically. In nature, DNA-binding and cleavage typically requires protein and both RNAs. However, single guide RNAs (“sgRNA”, or simply “gNRA”) can be engineered so as to incorporate aspects of both the crRNA and tracrRNA into a single RNA species. See, e.g., Jinek et al., Science 337:816-821(2012), which is incorporated herein by reference.

[0079] Cas9 nuclease sequences and structures are well known to those of skill in the art (see, e.g., Ferretti et al., Proc. Natl. Acad. Sci. 98:4658-4663(2001); Deltcheva E. et al., Nature 471:602-607(2011); and Jinek et al., Science 337:816-821(2012), each of which are incorporated herein by reference). Cas9 orthologs have been described in various species, including, but not limited to, S. pyogenes and S. thermophilus. Additional suitable Cas9 nucleases and sequences will be apparent to those of skill in the art based on this disclosure, and such Cas9 nucleases and sequences include Cas9 sequences from the organisms and loci disclosed in Chylinski et al., (2013) RNA Biology 10:5, 726-737; which are incorporated herein by reference. In some embodiments, wild type Cas9 corresponds to Cas9 from Streptococcus pyogenes (NCBI Reference Sequence: NC_002737.2, SEQ ID NO: 5 (nucleotide); and Uniport Reference Sequence: Q99ZW2, SEQ ID NO: 1 (amino acid).

Streptococcus pyogenes Cas9 (wild-type) nucleotide sequence
(SEQ ID NO: 5)
ATGGATAAGAAATACTCAATAGGCTTAGATATCGGCACAAATAGCGTCGGATGGGC
GGTGATCACTGATGAATATAAGGTTCCGTCTAAAAAGTTCAAGGTTCTGGGAAATAC
AGACCGCCACAGTATCAAAAAAAATCTTATAGGGGCTCTTTTATTTGACAGTGGAGA
GACAGCGGAAGCGACTCGTCTCAAACGGACAGCTCGTAGAAGGTATACACGTCGGA
AGAATCGTATTTGTTATCTACAGGAGATTTTTTCAAATGAGATGGCGAAAGTAGATG
ATAGTTTCTTTCATCGACTTGAAGAGTCTTTTTTGGTGGAAGAAGACAAGAAGCATG
AACGTCATCCTATTTTTGGAAATATAGTAGATGAAGTTGCTTATCATGAGAAATATC
CAACTATCTATCATCTGCGAAAAAAATTGGTAGATTCTACTGATAAAGCGGATTTGC
GCTTAATCTATTTGGCCTTAGCGCATATGATTAAGTTTCGTGGTCATTTTTTGATTGA
GGGAGATTTAAATCCTGATAATAGTGATGTGGACAAACTATTTATCCAGTTGGTACA
AACCTACAATCAATTATTTGAAGAAAACCCTATTAACGCAAGTGGAGTAGATGCTA
AAGCGATTCTTTCTGCACGATTGAGTAAATCAAGACGATTAGAAAATCTCATTGCTC
AGCTCCCCGGTGAGAAGAAAAATGGCTTATTTGGGAATCTCATTGCTTTGTCATTGG
GTTTGACCCCTAATTTTAAATCAAATTTTGATTTGGCAGAAGATGCTAAATTACAGC
TTTCAAAAGATACTTACGATGATGATTTAGATAATTTATTGGCGCAAATTGGAGATC
AATATGCTGATTTGTTTTTGGCAGCTAAGAATTTATCAGATGCTATTTTACTTTCAGA
TATCCTAAGAGTAAATACTGAAATAACTAAGGCTCCCCTATCAGCTTCAATGATTAA
ACGCTACGATGAACATCATCAAGACTTGACTCTTTTAAAAGCTTTAGTTCGACAACA
ACTTCCAGAAAAGTATAAAGAAATCTTTTTTGATCAATCAAAAAACGGATATGCAG
GTTATATTGATGGGGGAGCTAGCCAAGAAGAATTTTATAAATTTATCAAACCAATTT
TAGAAAAAATGGATGGTACTGAGGAATTATTGGTGAAACTAAATCGTGAAGATTTG
CTGCGCAAGCAACGGACCTTTGACAACGGCTCTATTCCCCATCAAATTCACTTGGGT
GAGCTGCATGCTATTTTGAGAAGACAAGAAGACTTTTATCCATTTTTAAAAGACAAT
CGTGAGAAGATTGAAAAAATCTTGACTTTTCGAATTCCTTATTATGTTGGTCCATTGG
CGCGTGGCAATAGTCGTTTTGCATGGATGACTCGGAAGTCTGAAGAAACAATTACCC
CATGGAATTTTGAAGAAGTTGTCGATAAAGGTGCTTCAGCTCAATCATTTATTGAAC
GCATGACAAACTTTGATAAAAATCTTCCAAATGAAAAAGTACTACCAAAACATAGT
TTGCTTTATGAGTATTTTACGGTTTATAACGAATTGACAAAGGTCAAATATGTTACTG
AAGGAATGCGAAAACCAGCATTTCTTTCAGGTGAACAGAAGAAAGCCATTGTTGAT
TTACTCTTCAAAACAAATCGAAAAGTAACCGTTAAGCAATTAAAAGAAGATTATTTC
AAAAAAATAGAATGTTTTGATAGTGTTGAAATTTCAGGAGTTGAAGATAGATTTAAT
GCTTCATTAGGTACCTACCATGATTTGCTAAAAATTATTAAAGATAAAGATTTTTTG
GATAATGAAGAAAATGAAGATATCTTAGAGGATATTGTTTTAACATTGACCTTATTT
GAAGATAGGGAGATGATTGAGGAAAGACTTAAAACATATGCTCACCTCTTTGATGA
TAAGGTGATGAAACAGCTTAAACGTCGCCGTTATACTGGTTGGGGACGTTTGTCTCG
AAAATTGATTAATGGTATTAGGGATAAGCAATCTGGCAAAACAATATTAGATTTTTT
GAAATCAGATGGTTTTGCCAATCGCAATTTTATGCAGCTGATCCATGATGATAGTTT
GACATTTAAAGAAGACATTCAAAAAGCACAAGTGTCTGGACAAGGCGATAGTTTAC
ATGAACATATTGCAAATTTAGCTGGTAGCCCTGCTATTAAAAAAGGTATTTTACAGA
CTGTAAAAGTTGTTGATGAATTGGTCAAAGTAATGGGGCGGCATAAGCCAGAAAAT
ATCGTTATTGAAATGGCACGTGAAAATCAGACAACTCAAAAGGGCCAGAAAAATTC
GCGAGAGCGTATGAAACGAATCGAAGAAGGTATCAAAGAATTAGGAAGTCAGATTC
TTAAAGAGCATCCTGTTGAAAATACTCAATTGCAAAATGAAAAGCTCTATCTCTATT
ATCTCCAAAATGGAAGAGACATGTATGTGGACCAAGAATTAGATATTAATCGTTTAA
GTGATTATGATGTCGATCACATTGTTCCACAAAGTTTCCTTAAAGACGATTCAATAG
ACAATAAGGTCTTAACGCGTTCTGATAAAAATCGTGGTAAATCGGATAACGTTCCAA
GTGAAGAAGTAGTCAAAAAGATGAAAAACTATTGGAGACAACTTCTAAACGCCAAG
TTAATCACTCAACGTAAGTTTGATAATTTAACGAAAGCTGAACGTGGAGGTTTGAGT
GAACTTGATAAAGCTGGTTTTATCAAACGCCAATTGGTTGAAACTCGCCAAATCACT
AAGCATGTGGCACAAATTTTGGATAGTCGCATGAATACTAAATACGATGAAAATGA
TAAACTTATTCGAGAGGTTAAAGTGATTACCTTAAAATCTAAATTAGTTTCTGACTTC
CGAAAAGATTTCCAATTCTATAAAGTACGTGAGATTAACAATTACCATCATGCCCAT
GATGCGTATCTAAATGCCGTCGTTGGAACTGCTTTGATTAAGAAATATCCAAAACTT
GAATCGGAGTTTGTCTATGGTGATTATAAAGTTTATGATGTTCGTAAAATGATTGCT
AAGTCTGAGCAAGAAATAGGCAAAGCAACCGCAAAATATTTCTTTTACTCTAATATC
ATGAACTTCTTCAAAACAGAAATTACACTTGCAAATGGAGAGATTCGCAAACGCCCT
CTAATCGAAACTAATGGGGAAACTGGAGAAATTGTCTGGGATAAAGGGCGAGATTT
TGCCACAGTGCGCAAAGTATTGTCCATGCCCCAAGTCAATATTGTCAAGAAAACAG
AAGTACAGACAGGCGGATTCTCCAAGGAGTCAATTTTACCAAAAAGAAATTCGGAC
AAGCTTATTGCTCGTAAAAAAGACTGGGATCCAAAAAAATATGGTGGTTTTGATAGT
CCAACGGTAGCTTATTCAGTCCTAGTGGTTGCTAAGGTGGAAAAAGGGAAATCGAA
GAAGTTAAAATCCGTTAAAGAGTTACTAGGGATCACAATTATGGAAAGAAGTTCCTT
TGAAAAAAATCCGATTGACTTTTTAGAAGCTAAAGGATATAAGGAAGTTAAAAAAG
ACTTAATCATTAAACTACCTAAATATAGTCTTTTTGAGTTAGAAAACGGTCGTAAAC
GGATGCTGGCTAGTGCCGGAGAATTACAAAAAGGAAATGAGCTGGCTCTGCCAAGC
AAATATGTGAATTTTTTATATTTAGCTAGTCATTATGAAAAGTTGAAGGGTAGTCCA
GAAGATAACGAACAAAAACAATTGTTTGTGGAGCAGCATAAGCATTATTTAGATGA
GATTATTGAGCAAATCAGTGAATTTTCTAAGCGTGTTATTTTAGCAGATGCCAATTT
AGATAAAGTTCTTAGTGCATATAACAAACATAGAGACAAACCAATACGTGAACAAG
CAGAAAATATTATTCATTTATTTACGTTGACGAATCTTGGAGCTCCCGCTGCTTTTAA
ATATTTTGATACAACAATTGATCGTAAACGATATACGTCTACAAAAGAAGTTTTAGA
TGCCACTCTTATCCATCAATCCATCACTGGTCTTTATGAAACACGCATTGATTTGAGT
CAGCTAGGAGGTGACTGA
Streptococcus pyogenes Cas9 (wild-type) protein sequence
(SEQ ID NO: 1)
[sequence omitted]
(single underline: HNH domain; double underline: RuvC domain)

[0080] In some embodiments, wild-type Cas9 corresponds to Cas9 from Streptococcus pyogenes (NCBI Reference Sequence: NC_017053.1, SEQ ID NO 2003 (nucleotide); SEQ ID NO: 2004 (amino acid)):

(SEQ ID NO: 2003)
ATGGATAAGAAATACTCAATAGGCTTAGATATCGGCACAAATAGCGTCGGATGGGC
GGTGATCACTGATGATTATAAGGTTCCGTCTAAAAAGTTCAAGGTTCTGGGAAATAC
AGACCGCCACAGTATCAAAAAAAATCTTATAGGGGCTCTTTTATTTGGCAGTGGAGA
GACAGCGGAAGCGACTCGTCTCAAACGGACAGCTCGTAGAAGGTATACACGTCGGA
AGAATCGTATTTGTTATCTACAGGAGATTTTTTCAAATGAGATGGCGAAAGTAGATG
ATAGTTTCTTTCATCGACTTGAAGAGTCTTTTTTGGTGGAAGAAGACAAGAAGCATG
AACGTCATCCTATTTTTGGAAATATAGTAGATGAAGTTGCTTATCATGAGAAATATC
CAACTATCTATCATCTGCGAAAAAAATTGGCAGATTCTACTGATAAAGCGGATTTGC
GCTTAATCTATTTGGCCTTAGCGCATATGATTAAGTTTCGTGGTCATTTTTTGATTGA
GGGAGATTTAAATCCTGATAATAGTGATGTGGACAAACTATTTATCCAGTTGGTACA
AATCTACAATCAATTATTTGAAGAAAACCCTATTAACGCAAGTAGAGTAGATGCTAA
AGCGATTCTTTCTGCACGATTGAGTAAATCAAGACGATTAGAAAATCTCATTGCTCA
GCTCCCCGGTGAGAAGAGAAATGGCTTGTTTGGGAATCTCATTGCTTTGTCATTGGG
ATTGACCCCTAATTTTAAATCAAATTTTGATTTGGCAGAAGATGCTAAATTACAGCT
TTCAAAAGATACTTACGATGATGATTTAGATAATTTATTGGCGCAAATTGGAGATCA
ATATGCTGATTTGTTTTTGGCAGCTAAGAATTTATCAGATGCTATTTTACTTTCAGAT
ATCCTAAGAGTAAATAGTGAAATAACTAAGGCTCCCCTATCAGCTTCAATGATTAAG
CGCTACGATGAACATCATCAAGACTTGACTCTTTTAAAAGCTTTAGTTCGACAACAA
CTTCCAGAAAAGTATAAAGAAATCTTTTTTGATCAATCAAAAAACGGATATGCAGGT
TATATTGATGGGGGAGCTAGCCAAGAAGAATTTTATAAATTTATCAAACCAATTTTA
GAAAAAATGGATGGTACTGAGGAATTATTGGTGAAACTAAATCGTGAAGATTTGCT
GCGCAAGCAACGGACCTTTGACAACGGCTCTATTCCCCATCAAATTCACTTGGGTGA
GCTGCATGCTATTTTGAGAAGACAAGAAGACTTTTATCCATTTTTAAAAGACAATCG
TGAGAAGATTGAAAAAATCTTGACTTTTCGAATTCCTTATTATGTTGGTCCATTGGCG
CGTGGCAATAGTCGTTTTGCATGGATGACTCGGAAGTCTGAAGAAACAATTACCCCA
TGGAATTTTGAAGAAGTTGTCGATAAAGGTGCTTCAGCTCAATCATTTATTGAACGC
ATGACAAACTTTGATAAAAATCTTCCAAATGAAAAAGTACTACCAAAACATAGTTTG
CTTTATGAGTATTTTACGGTTTATAACGAATTGACAAAGGTCAAATATGTTACTGAG
GGAATGCGAAAACCAGCATTTCTTTCAGGTGAACAGAAGAAAGCCATTGTTGATTTA
CTCTTCAAAACAAATCGAAAAGTAACCGTTAAGCAATTAAAAGAAGATTATTTCAA
AAAAATAGAATGTTTTGATAGTGTTGAAATTTCAGGAGTTGAAGATAGATTTAATGC
TTCATTAGGCGCCTACCATGATTTGCTAAAAATTATTAAAGATAAAGATTTTTTGGA
TAATGAAGAAAATGAAGATATCTTAGAGGATATTGTTTTAACATTGACCTTATTTGA
AGATAGGGGGATGATTGAGGAAAGACTTAAAACATATGCTCACCTCTTTGATGATA
AGGTGATGAAACAGCTTAAACGTCGCCGTTATACTGGTTGGGGACGTTTGTCTCGAA
AATTGATTAATGGTATTAGGGATAAGCAATCTGGCAAAACAATATTAGATTTTTTGA
AATCAGATGGTTTTGCCAATCGCAATTTTATGCAGCTGATCCATGATGATAGTTTGA
CATTTAAAGAAGATATTCAAAAAGCACAGGTGTCTGGACAAGGCCATAGTTTACAT
GAACAGATTGCTAACTTAGCTGGCAGTCCTGCTATTAAAAAAGGTATTTTACAGACT
GTAAAAATTGTTGATGAACTGGTCAAAGTAATGGGGCATAAGCCAGAAAATATCGT
TATTGAAATGGCACGTGAAAATCAGACAACTCAAAAGGGCCAGAAAAATTCGCGAG
AGCGTATGAAACGAATCGAAGAAGGTATCAAAGAATTAGGAAGTCAGATTCTTAAA
GAGCATCCTGTTGAAAATACTCAATTGCAAAATGAAAAGCTCTATCTCTATTATCTA
CAAAATGGAAGAGACATGTATGTGGACCAAGAATTAGATATTAATCGTTTAAGTGA
TTATGATGTCGATCACATTGTTCCACAAAGTTTCATTAAAGACGATTCAATAGACAA
TAAGGTACTAACGCGTTCTGATAAAAATCGTGGTAAATCGGATAACGTTCCAAGTGA
AGAAGTAGTCAAAAAGATGAAAAACTATTGGAGACAACTTCTAAACGCCAAGTTAA
TCACTCAACGTAAGTTTGATAATTTAACGAAAGCTGAACGTGGAGGTTTGAGTGAAC
TTGATAAAGCTGGTTTTATCAAACGCCAATTGGTTGAAACTCGCCAAATCACTAAGC
ATGTGGCACAAATTTTGGATAGTCGCATGAATACTAAATACGATGAAAATGATAAA
CTTATTCGAGAGGTTAAAGTGATTACCTTAAAATCTAAATTAGTTTCTGACTTCCGA
AAAGATTTCCAATTCTATAAAGTACGTGAGATTAACAATTACCATCATGCCCATGAT
GCGTATCTAAATGCCGTCGTTGGAACTGCTTTGATTAAGAAATATCCAAAACTTGAA
TCGGAGTTTGTCTATGGTGATTATAAAGTTTATGATGTTCGTAAAATGATTGCTAAGT
CTGAGCAAGAAATAGGCAAAGCAACCGCAAAATATTTCTTTTACTCTAATATCATGA
ACTTCTTCAAAACAGAAATTACACTTGCAAATGGAGAGATTCGCAAACGCCCTCTAA
TCGAAACTAATGGGGAAACTGGAGAAATTGTCTGGGATAAAGGGCGAGATTTTGCC
ACAGTGCGCAAAGTATTGTCCATGCCCCAAGTCAATATTGTCAAGAAAACAGAAGT
ACAGACAGGCGGATTCTCCAAGGAGTCAATTTTACCAAAAAGAAATTCGGACAAGC
TTATTGCTCGTAAAAAAGACTGGGATCCAAAAAAATATGGTGGTTTTGATAGTCCAA
CGGTAGCTTATTCAGTCCTAGTGGTTGCTAAGGTGGAAAAAGGGAAATCGAAGAAG
TTAAAATCCGTTAAAGAGTTACTAGGGATCACAATTATGGAAAGAAGTTCCTTTGAA
AAAAATCCGATTGACTTTTTAGAAGCTAAAGGATATAAGGAAGTTAAAAAAGACTT
AATCATTAAACTACCTAAATATAGTCTTTTTGAGTTAGAAAACGGTCGTAAACGGAT
GCTGGCTAGTGCCGGAGAATTACAAAAAGGAAATGAGCTGGCTCTGCCAAGCAAAT
ATGTGAATTTTTTATATTTAGCTAGTCATTATGAAAAGTTGAAGGGTAGTCCAGAAG
ATAACGAACAAAAACAATTGTTTGTGGAGCAGCATAAGCATTATTTAGATGAGATT
ATTGAGCAAATCAGTGAATTTTCTAAGCGTGTTATTTTAGCAGATGCCAATTTAGAT
AAAGTTCTTAGTGCATATAACAAACATAGAGACAAACCAATACGTGAACAAGCAGA
AAATATTATTCATTTATTTACGTTGACGAATCTTGGAGCTCCCGCTGCTTTTAAATAT
TTTGATACAACAATTGATCGTAAACGATATACGTCTACAAAAGAAGTTTTAGATGCC
ACTCTTATCCATCAATCCATCACTGGTCTTTATGAAACACGCATTGATTTGAGTCAGC
TAGGAGGTGACTGA
(SEQ ID NO: 2004)
MDKKYSIGLDIGTNSVGWAVITDDYKVPSKKFKVLGNTDRHSIKKNLIGALLFGSGETA
EATRLKRTARRRYTRRKNRICYLQEIFSNEMAKVDDSFFHRLEESFLVEEDKKHERHPIF
GNIVDEVAYHEKYPTIYHLRKKLADSTDKADLRLIYLALAHMIKFRGHFLIEGDLNPDNS
DVDKLFIQLVQIYNQLFEENPINASRVDAKAILSARLSKSRRLENLIAQLPGEKRNGLFGN
LIALSLGLTPNFKSNFDLAEDAKLQLSKDTYDDDLDNLLAQIGDQYADLFLAAKNLSDA
ILLSDILRVNSEITKAPLSASMIKRYDEHHQDLTLLKALVRQQLPEKYKEIFFDQSKNGYA
GYIDGGASQEEFYKFIKPILEKMDGTEELLVKLNREDLLRKQRTFDNGSIPHQIHLGELH
AILRRQEDFYPFLKDNREKIEKILTFRIPYYVGPLARGNSRFAWMTRKSEETITPWNFEEV
VDKGASAQSFIERMTNFDKNLPNEKVLPKHSLLYEYFTVYNELTKVKYVTEGMRKPAF
LSGEQKKAIVDLLFKTNRKVTVKQLKEDYFKKIECFDSVEISGVEDRFNASLGAYHDLL
KIIKDKDFLDNEENEDILEDIVLTLTLFEDRGMIEERLKTYAHLFDDKVMKQLKRRRYTG
WGRLSRKLINGIRDKQSGKTILDFLKSDGFANRNFMQLIHDDSLTFKEDIQKAQVSGQG
HSLHEQIANLAGSPAIKKGILQTVKIVDELVKVMGHKPENIVIEMARENQTTQKGQKNS
RERMKRIEEGIKELGSQILKEHPVENTQLQNEKLYLYYLQNGRDMYVDQELDINRLSDY
DVDHIVPQSFIKDDSIDNKVLTRSDKNRGKSDNVPSEEVVKKMKNYWRQLLNAKLITQ
RKFDNLTKAERGGLSELDKAGFIKRQLVETRQITKHVAQILDSRMNTKYDENDKLIREV
KVITLKSKLVSDFRKDFQFYKVREINNYHHAHDAYLNAVVGTALIKKYPKLESEFVYGD
YKVYDVRKMIAKSEQEIGKATAKYFFYSNIMNFFKTEITLANGEIRKRPLIETNGETGEIV
WDKGRDFATVRKVLSMPQVNIVKKTEVQTGGFSKESILPKRNSDKLIARKKDWDPKKY
GGFDSPTVAYSVLVVAKVEKGKSKKLKSVKELLGITIMERSSFEKNPIDFLEAKGYKEV
KKDLIIKLPKYSLFELENGRKRMLASAGELQKGNELALPSKYVNFLYLASHYEKLKGSP
EDNEQKQLFVEQHKHYLDEIIEQISEFSKRVILADANLDKVLSAYNKHRDKPIREQAENII
HLFTLTNLGAPAAFKYFDTTIDRKRYTSTKEVLDATLIHQSITGLYETRIDLSQLGGD
(single underline: HNH domain; double underline: RuvC domain)

[0081] In some embodiments, wild type Cas9 corresponds to, or comprises, Cas9 from Streptococcus pyogenes (SEQ ID NO: 2005 (nucleotide) and/or SEQ ID NO: 2006 (amino acid)):

(SEQ ID NO: 2005)
ATGGATAAAAAGTATTCTATTGGTTTAGACATCGGCACTAATTCCGTTGGATGGGCT
GTCATAACCGATGAATACAAAGTACCTTCAAAGAAATTTAAGGTGTTGGGGAACAC
AGACCGTCATTCGATTAAAAAGAATCTTATCGGTGCCCTCCTATTCGATAGTGGCGA
AACGGCAGAGGCGACTCGCCTGAAACGAACCGCTCGGAGAAGGTATACACGTCGCA
AGAACCGAATATGTTACTTACAAGAAATTTTTAGCAATGAGATGGCCAAAGTTGAC
GATTCTTTCTTTCACCGTTTGGAAGAGTCCTTCCTTGTCGAAGAGGACAAGAAACAT
GAACGGCACCCCATCTTTGGAAACATAGTAGATGAGGTGGCATATCATGAAAAGTA
CCCAACGATTTATCACCTCAGAAAAAAGCTAGTTGACTCAACTGATAAAGCGGACCT
GAGGTTAATCTACTTGGCTCTTGCCCATATGATAAAGTTCCGTGGGCACTTTCTCATT
GAGGGTGATCTAAATCCGGACAACTCGGATGTCGACAAACTGTTCATCCAGTTAGTA
CAAACCTATAATCAGTTGTTTGAAGAGAACCCTATAAATGCAAGTGGCGTGGATGC
GAAGGCTATTCTTAGCGCCCGCCTCTCTAAATCCCGACGGCTAGAAAACCTGATCGC
ACAATTACCCGGAGAGAAGAAAAATGGGTTGTTCGGTAACCTTATAGCGCTCTCACT
AGGCCTGACACCAAATTTTAAGTCGAACTTCGACTTAGCTGAAGATGCCAAATTGCA
GCTTAGTAAGGACACGTACGATGACGATCTCGACAATCTACTGGCACAAATTGGAG
ATCAGTATGCGGACTTATTTTTGGCTGCCAAAAACCTTAGCGATGCAATCCTCCTAT
CTGACATACTGAGAGTTAATACTGAGATTACCAAGGCGCCGTTATCCGCTTCAATGA
TCAAAAGGTACGATGAACATCACCAAGACTTGACACTTCTCAAGGCCCTAGTCCGTC
AGCAACTGCCTGAGAAATATAAGGAAATATTCTTTGATCAGTCGAAAAACGGGTAC
GCAGGTTATATTGACGGCGGAGCGAGTCAAGAGGAATTCTACAAGTTTATCAAACC
CATATTAGAGAAGATGGATGGGACGGAAGAGTTGCTTGTAAAACTCAATCGCGAAG
ATCTACTGCGAAAGCAGCGGACTTTCGACAACGGTAGCATTCCACATCAAATCCACT
TAGGCGAATTGCATGCTATACTTAGAAGGCAGGAGGATTTTTATCCGTTCCTCAAAG
ACAATCGTGAAAAGATTGAGAAAATCCTAACCTTTCGCATACCTTACTATGTGGGAC
CCCTGGCCCGAGGGAACTCTCGGTTCGCATGGATGACAAGAAAGTCCGAAGAAACG
ATTACTCCATGGAATTTTGAGGAAGTTGTCGATAAAGGTGCGTCAGCTCAATCGTTC
ATCGAGAGGATGACCAACTTTGACAAGAATTTACCGAACGAAAAAGTATTGCCTAA
GCACAGTTTACTTTACGAGTATTTCACAGTGTACAATGAACTCACGAAAGTTAAGTA
TGTCACTGAGGGCATGCGTAAACCCGCCTTTCTAAGCGGAGAACAGAAGAAAGCAA
TAGTAGATCTGTTATTCAAGACCAACCGCAAAGTGACAGTTAAGCAATTGAAAGAG
GACTACTTTAAGAAAATTGAATGCTTCGATTCTGTCGAGATCTCCGGGGTAGAAGAT
CGATTTAATGCGTCACTTGGTACGTATCATGACCTCCTAAAGATAATTAAAGATAAG
GACTTCCTGGATAACGAAGAGAATGAAGATATCTTAGAAGATATAGTGTTGACTCTT
ACCCTCTTTGAAGATCGGGAAATGATTGAGGAAAGACTAAAAACATACGCTCACCT
GTTCGACGATAAGGTTATGAAACAGTTAAAGAGGCGTCGCTATACGGGCTGGGGAC
GATTGTCGCGGAAACTTATCAACGGGATAAGAGACAAGCAAAGTGGTAAAACTATT
CTCGATTTTCTAAAGAGCGACGGCTTCGCCAATAGGAACTTTATGCAGCTGATCCAT
GATGACTCTTTAACCTTCAAAGAGGATATACAAAAGGCACAGGTTTCCGGACAAGG
GGACTCATTGCACGAACATATTGCGAATCTTGCTGGTTCGCCAGCCATCAAAAAGGG
CATACTCCAGACAGTCAAAGTAGTGGATGAGCTAGTTAAGGTCATGGGACGTCACA
AACCGGAAAACATTGTAATCGAGATGGCACGCGAAAATCAAACGACTCAGAAGGG
GCAAAAAAACAGTCGAGAGCGGATGAAGAGAATAGAAGAGGGTATTAAAGAACTG
GGCAGCCAGATCTTAAAGGAGCATCCTGTGGAAAATACCCAATTGCAGAACGAGAA
ACTTTACCTCTATTACCTACAAAATGGAAGGGACATGTATGTTGATCAGGAACTGGA
CATAAACCGTTTATCTGATTACGACGTCGATCACATTGTACCCCAATCCTTTTTGAAG
GACGATTCAATCGACAATAAAGTGCTTACACGCTCGGATAAGAACCGAGGGAAAAG
TGACAATGTTCCAAGCGAGGAAGTCGTAAAGAAAATGAAGAACTATTGGCGGCAGC
TCCTAAATGCGAAACTGATAACGCAAAGAAAGTTCGATAACTTAACTAAAGCTGAG
AGGGGTGGCTTGTCTGAACTTGACAAGGCCGGATTTATTAAACGTCAGCTCGTGGAA
ACCCGCCAAATCACAAAGCATGTTGCACAGATACTAGATTCCCGAATGAATACGAA
ATACGACGAGAACGATAAGCTGATTCGGGAAGTCAAAGTAATCACTTTAAAGTCAA
AATTGGTGTCGGACTTCAGAAAGGATTTTCAATTCTATAAAGTTAGGGAGATAAATA
ACTACCACCATGCGCACGACGCTTATCTTAATGCCGTCGTAGGGACCGCACTCATTA
AGAAATACCCGAAGCTAGAAAGTGAGTTTGTGTATGGTGATTACAAAGTTTATGAC
GTCCGTAAGATGATCGCGAAAAGCGAACAGGAGATAGGCAAGGCTACAGCCAAAT
ACTTCTTTTATTCTAACATTATGAATTTCTTTAAGACGGAAATCACTCTGGCAAACGG
AGAGATACGCAAACGACCTTTAATTGAAACCAATGGGGAGACAGGTGAAATCGTAT
GGGATAAGGGCCGGGACTTCGCGACGGTGAGAAAAGTTTTGTCCATGCCCCAAGTC
AACATAGTAAAGAAAACTGAGGTGCAGACCGGAGGGTTTTCAAAGGAATCGATTCT
TCCAAAAAGGAATAGTGATAAGCTCATCGCTCGTAAAAAGGACTGGGACCCGAAAA
AGTACGGTGGCTTCGATAGCCCTACAGTTGCCTATTCTGTCCTAGTAGTGGCAAAAG
TTGAGAAGGGAAAATCCAAGAAACTGAAGTCAGTCAAAGAATTATTGGGGATAACG
ATTATGGAGCGCTCGTCTTTTGAAAAGAACCCCATCGACTTCCTTGAGGCGAAAGGT
TACAAGGAAGTAAAAAAGGATCTCATAATTAAACTACCAAAGTATAGTCTGTTTGA
GTTAGAAAATGGCCGAAAACGGATGTTGGCTAGCGCCGGAGAGCTTCAAAAGGGGA
ACGAACTCGCACTACCGTCTAAATACGTGAATTTCCTGTATTTAGCGTCCCATTACG
AGAAGTTGAAAGGTTCACCTGAAGATAACGAACAGAAGCAACTTTTTGTTGAGCAG
CACAAACATTATCTCGACGAAATCATAGAGCAAATTTCGGAATTCAGTAAGAGAGT
CATCCTAGCTGATGCCAATCTGGACAAAGTATTAAGCGCATACAACAAGCACAGGG
ATAAACCCATACGTGAGCAGGCGGAAAATATTATCCATTTGTTTACTCTTACCAACC
TCGGCGCTCCAGCCGCATTCAAGTATTTTGACACAACGATAGATCGCAAACGATACA
CTTCTACCAAGGAGGTGCTAGACGCGACACTGATTCACCAATCCATCACGGGATTAT
ATGAAACTCGGATAGATTTGTCACAGCTTGGGGGTGACGGATCCCCCAAGAAGAAG
AGGAAAGTCTCGAGCGACTACAAAGACCATGACGGTGATTATAAAGATCATGACAT
CGATTACAAGGATGACGATGACAAGGCTGCAGGA
(SEQ ID NO: 2006)
MDKKYSIGLAIGTNSVGWAVITDEYKVPSKKFKVLGNTDRHSIKKNLIGALLFDSGETA
EATRLKRTARRRYTRRKNRICYLQEIFSNEMAKVDDSFFHRLEESFLVEEDKKHERHPIF
GNIVDEVAYHEKYPTIYHLRKKLVDSTDKADLRLIYLALAHMIKFRGHFLIEGDLNPDNS
DVDKLFIQLVQTYNQLFEENPINASGVDAKAILSARLSKSRRLENLIAQLPGEKKNGLFG
NLIALSLGLTPNFKSNFDLAEDAKLQLSKDTYDDDLDNLLAQIGDQYADLFLAAKNLSD
AILLSDILRVNTEITKAPLSASMIKRYDEHHQDLTLLKALVRQQLPEKYKEIFFDQSKNGY
AGYIDGGASQEEFYKFIKPILEKMDGTEELLVKLNREDLLRKQRTFDNGSIPHQIHLGEL
HAILRRQEDFYPFLKDNREKIEKILTFRIPYYVGPLARGNSRFAWMTRKSEETITPWNFEE
VVDKGASAQSFIERMTNFDKNLPNEKVLPKHSLLYEYFTVYNELTKVKYVTEGMRKPA
FLSGEQKKAIVDLLFKTNRKVTVKQLKEDYFKKIECFDSVEISGVEDRFNASLGTYHDLL
KIIKDKDFLDNEENEDILEDIVLTLTLFEDREMIEERLKTYAHLFDDKVMKQLKRRRYTG
WGRLSRKLINGIRDKQSGKTILDFLKSDGFANRNFMQLIHDDSLTFKEDIQKAQVSGQG
DSLHEHIANLAGSPAIKKGILQTVKVVDELVKVMGRHKPENIVIEMARENQTTQKGQKN
SRERMKRIEEGIKELGSQILKEHPVENTQLQNEKLYLYYLQNGRDMYVDQELDINRLSD
YDVDHIVPQSFLKDDSIDNKVLTRSDKNRGKSDNVPSEEVVKKMKNYWRQLLNAKLIT
QRKFDNLTKAERGGLSELDKAGFIKRQLVETRQITKHVAQILDSRMNTKYDENDKLIRE
VKVITLKSKLVSDFRKDFQFYKVREINNYHHAHDAYLNAVVGTALIKKYPKLESEFVYG
DYKVYDVRKMIAKSEQEIGKATAKYFFYSNIMNFFKTEITLANGEIRKRPLIETNGETGEI
VWDKGRDFATVRKVLSMPQVNIVKKTEVQTGGFSKESILPKRNSDKLIARKKDWDPKK
YGGFDSPTVAYSVLVVAKVEKGKSKKLKSVKELLGITIMERSSFEKNPIDFLEAKGYKE
VKKDLIIKLPKYSLFELENGRKRMLASAGELQKGNELALPSKYVNFLYLASHYEKLKGS
PEDNEQKQLFVEQHKHYLDEIIEQISEFSKRVILADANLDKVLSAYNKHRDKPIREQAENI
IHLFTLTNLGAPAAFKYFDTTIDRKRYTSTKEVLDATLIHQSITGLYETRIDLSQLGGD
(single underline: HNH domain; double underline: RuvC domain)

[0082] In some embodiments, wild type Cas9 corresponds to Cas9 from Streptococcus Aureus. S. aureus Cas9 wild type (SEQ ID NO: 6)

(SEQ ID NO: 6)

MKRNYILGLDIGITSVGYGIIDYETRDVIDAGVRLFKEANVENNEGRRSK
RGARRLKRRRRHRIQRVKKLLFDYNLLTDHSELSGINPYEARVKGLSQKL
SEEEFSAALLHLAKRRGVHNVNEVEEDTGNELSTKEQISRNSKALEEKYV
AELQLERLKKDGEVRGSINRFKTSDYVKEAKQLLKVQKAYHQLDQSFIDT
YIDLLETRRTYYEGPGEGSPFGWKDIKEWYEMLMGHCTYFPEELRSVKYA
YNADLYNALNDLNNLVITRDENEKLEYYEKFQIIENVFKQKKKPTLKQIA
KEILVNEEDIKGYRVTSTGKPEFTNLKVYHDIKDITARKEIIENAELLDQ
IAKILTIYQSSEDIQEELTNLNSELTQEEIEQISNLKGYTGTHNLSLKAI
NLILDELWHTNDNQIAIFNRLKLVPKKVDLSQQKEIPTTLVDDFILSPVV
KRSFIQSIKVINAIIKKYGLPNDIIIELAREKNSKDAQKMINEMQKRNRQ
TNERIEEIIRTTGKENAKYLIEKIKLHDMQEGKCLYSLEAIPLEDLLNNP
FNYEVDHIIPRSVSFDNSFNNKVLVKQEENSKKGNRTPFQYLSSSDSKIS
YETFKKHILNLAKGKGRISKTKKEYLLEERDINRFSVQKDFINRNLVDTR
YATRGLMNLLRSYFRVNNLDVKVKSINGGFTSFLRRKWKFKKERNKGYKH
HAEDALIIANADFIFKEWKKLDKAKKVMENQMFEEKQAESMPEIETEQEY
KEIFITPHQIKHIKDFKDYKYSHRVDKKPNRELINDTLYSTRKDDKGNTL
IVNNLNGLYDKDNDKLKKLINKSPEKLLMYHHDPQTYQKLKLIMEQYGDE
KNPLYKYYEETGNYLTKYSKKDNGPVIKKIKYYGNKLNAHLDITDDYPNS
RNKVVKLSLKPYRFDVYLDNGVYKFVTVKNLDVIKKENYYEVNSKCYEEA
KKLKKISNQAEFIASFYNNDLIKINGELYRVIGVNNDLLNRIEVNMIDIT
YREYLENMNDKRPPRIIKTIASKTQSIKKYSTDILGNLYEVKSKKHPQII
KKG

[0083] In some embodiments, wild type Cas9 corresponds to Cas9 from Streptococcus thermophilus.

Streptococcus thermophilus wild type CRISPR3
Cas9 (St3Cas9)

(SEQ ID NO: 7)

MTKPYSIGLDIGTNSVGWAVITDNYKVPSKKMKVLGNTSKKYIKKNLLGV
LLFDSGITAEGRRLKRTARRRYTRRRNRILYLQEIFSTEMATLDDAFFQR
LDDSFLVPDDKRDSKYPIFGNLVEEKVYHDEFPTIYHLRKYLADSTKKAD
LRLVYLALAHMIKYRGHFLIEGEFNSKNNDIQKNFQDFLDTYNAIFESDL
SLENSKQLEEIVKDKISKLEKKDRILKLFPGEKNSGIFSEFLKLIVGNQA
DFRKCFNLDEKASLHFSKESYDEDLETLLGYIGDDYSDVFLKAKKLYDAI
LLSGFLTVTDNETEAPLSSAMIKRYNEHKEDLALLKEYIRNISLKTYNEV
FKDDTKNGYAGYIDGKTNQEDFYVYLKNLLAEFEGADYFLEKIDREDFLR
KQRTFDNGSIPYQIHLQEMRAILDKQAKFYPFLAKNKERIEKILTFRIPY
YVGPLARGNSDFAWSIRKRNEKITPWNFEDVIDKESSAEAFINRMTSFDL
YLPEEKVLPKHSLLYETFNVYNELTKVRFIAESMRDYQFLDSKQKKDIVR
LYFKDKRKVTDKDIIEYLHAIYGYDGIELKGIEKQFNSSLSTYHDLLNII
NDKEFLDDSSNEAIIEEIIHTLTIFEDREMIKQRLSKFENIFDKSVLKKL
SRRHYTGWGKLSAKLINGIRDEKSGNTILDYLIDDGISNRNFMQLIHDDA
LSFKKKIQKAQIIGDEDKGNIKEVVKSLPGSPAIKKGILQSIKIVDELVK
VMGGRKPESIVVEMARENQYTNQGKSNSQQRLKRLEKSLKELGSKILKEN
IPAKLSKIDNNALQNDRLYLYYLQNGKDMYTGDDLDIDRLSNYDIDHIIP
QAFLKDNSIDNKVLVSSASNRGKSDDFPSLEVVKKRKTFWYQLLKSKLIS
QRKFDNLTKAERGGLLPEDKAGFIQRQLVETRQITKHVARLLDEKFNNKK
DENNRAVRTVKIITLKSTLVSQFRKDFELYKVREINDFHHAHDAYLNAVI
ASALLKKYPKLEPEFVYGDYPKYNSFRERKSATEKVYFYSNIMNIFKKSI
SLADGRVIERPLIEVNEETGESVWNKESDLATVRRVLSYPQVNVVKKVEE
QNHGLDRGKPKGLFNANLSSKPKPNSNENLVGAKEYLDPKKYGGYAGISN
SFAVLVKGTIEKGAKKKITNVLEFQGISILDRINYRKDKLNFLLEKGYKD
IELIIELPKYSLFELSDGSRRMLASILSTNNKRGEIHKGNQIFLSQKFVK
LLYHAKRISNTINENHRKYVENHKKEFEELFYYILEFNENYVGAKKNGKL
LNSAFQSWQNHSIDELCSSFIGPTGSERKGLFELTSRGSAADFEFLGVKI
PRYRDYTPSSLLKDATLIHQSVTGLYETRIDLAKLGEG
Streptococcus thermophilus CRISPR1 Cas9 wild
type (St1Cas9)

(SEQ ID NO: 8)

MSDLVLGLDIGIGSVGVGILNKVTGEIIHKNSRIFPAAQAENNLVRRTNR
QGRRLTRRKKHRRVRLNRLFEESGLITDFTKISINLNPYQLRVKGLTDEL
SNEELFIALKNMVKHRGISYLDDASDDGNSSIGDYAQIVKENSKQLETKT
PGQIQLERYQTYGQLRGDFTVEKDGKKHRLINVFPTSAYRSEALRILQTQ
QEFNPQITDEFINRYLEILTGKRKYYHGPGNEKSRTDYGRYRTSGETLDN
IFGILIGKCTFYPDEFRAAKASYTAQEFNLLNDLNNLTVPTETKKLSKEQ
KNQIINYVKNEKAMGPAKLFKYIAKLLSCDVADIKGYRIDKSGKAEIHTF
EAYRKMKTLETLDIEQMDRETLDKLAYVLTLNTEREGIQEALEHEFADGS
FSQKQVDELVQFRKANSSIFGKGWHNFSVKLMMELIPELYETSEEQMTIL
TRLGKQKTTSSSNKTKYIDEKLLTEEIYNPVVAKSVRQAIKIVNAAIKEY
GDFDNIVIEMARETNEDDEKKAIQKIQKANKDEKDAAMLKAANQYNGKAE
LPHSVFHGHKQLATKIRLWHQQGERCLYTGKTISIHDLINNSNQFEVDHI
LPLSITFDDSLANKVLVYATANQEKGQRTPYQALDSMDDAWSFRELKAFV
RESKTLSNKKKEYLLTEEDISKFDVRKKFIERNLVDTRYASRVVLNALQE
HFRAHKIDTKVSVVRGQFTSQLRRHWGIEKTRDTYHHHAVDALIIAASSQ
LNLWKKQKNTLVSYSEDQLLDIETGELISDDEYKESVFKAPYQHFVDTLK
SKEFEDSILFSYQVDSKFNRKISDATIYATRQAKVGKDKADETYVLGKIK
DIYTQDGYDAFMKIYKKDKSKFLMYRHDPQTFEKVIEPILENYPNKQINE
KGKEVPCNPFLKYKEEHGYIRKYSKKGNGPEIKSLKYYDSKLGNHIDITP
KDSNNKVVLQSVSPWRADVYFNKTTGKYEILGLKYADLQFEKGTGTYKIS
QEKYNDIKKKEGVDSDSEFKFTLYKNDLLLVKDTETKEQQLFRFLSRTMP
KQKHYVELKPYDKQKFEGGEALIKVLGNVANSGQCKKGLGKSNISIYKVR
TDVLGNQHIIKNEGDKPKLDF

[0084] In some embodiments, Cas9 refers to Cas9 from: Corynebacterium ulcerans (NCBI Refs: NC_015683.1, NC_017317.1); Corynebacterium diphtheria (NCBI Refs: NC_016782.1, NC_016786.1); Spiroplasma syrphidicola (NCBI Ref: NC_021284.1); Prevotella intermedia (NCBI Ref: NC_017861.1); Spiroplasma taiwanense (NCBI Ref: NC_021846.1); Streptococcus iniae (NCBI Ref: NC_021314.1); Belliella baltica (NCBI Ref: NC_018010.1); Psychroflexus torquis I (NCBI Ref: NC_018721.1); Listeria innocua (NCBI Ref: NP_472073.1), Campylobacter jejuni (NCBI Ref: YP_002344900.1) or Neisseria. meningitidis (NCBI Ref: YP_002342100.1) or to a Cas9 from any of the organisms listed in Example 1 (SEQ ID NOs: 11-260).

[0085] In some embodiments, proteins comprising fragments of Cas9 are provided. For example, in some embodiments, a protein comprises one of two Cas9 domains: (1) the gRNA binding domain of Cas9; or (2) the DNA cleavage domain of Cas9. In some embodiments, proteins comprising Cas9 or fragments thereof are referred to as “Cas9 variants.” A Cas9 variant shares homology to Cas9, or a fragment thereof. For example, a Cas9 variant is at least about 70% identical, at least about 80% identical, at least about 90% identical, at least about 95% identical, at least about 96% identical, at least about 97% identical, at least about 98% identical, at least about 99% identical, at least about 99.5% identical, or at least about 99.9% identical to wild type Cas9. In some embodiments, the Cas9 variant may have 1, 2, 3, 4, 5, 6, 7, 8, 9, 10, 11, 12, 13, 14, 15, 16, 17, 18, 19, 20, 21, 22, 21, 24, 25, 26, 27, 28, 29, 30, 31, 32, 33, 34, 35, 36, 37, 38, 39, 40, 41, 42, 43, 44, 45, 46, 47, 48, 49, 50, or more amino acid changes compared to wild type Cas9. In some embodiments, the Cas9 variant comprises a fragment of Cas9 (e.g., a gRNA binding domain or a DNA-cleavage domain), such that the fragment is at least about 70% identical, at least about 80% identical, at least about 90% identical, at least about 95% identical, at least about 96% identical, at least about 97% identical, at least about 98% identical, at least about 99% identical, at least about 99.5% identical, or at least about 99.9% identical to the corresponding fragment of wild type Cas9. In some embodiments, the fragment is at least 30%, at least 35%, at least 40%, at least 45%, at least 50%, at least 55%, at least 60%, at least 65%, at least 70%, at least 75%, at least 80%, at least 85%, at least 90%, at least 95% identical, at least 96%, at least 97%, at least 98%, at least 99%, or at least 99.5% of the amino acid length of a corresponding wild type Cas9. In some embodiments, the fragment is at least 100 amino acids in length. In some embodiments, the fragment is at least 100, at least 150, at least 200, at least 250, at least 300, at least 350, at least 400, at least 450, at least 500, at least 550, at least 600, at least 650, at least 700, at least 750, at least 800, at least 850, at least 900, at least 950, at least 1000, at least 1050, at least 1100, at least 1150, at least 1200, at least 1250, or at least 1300 amino acids in length.

[0086] To be used as in the fusion protein of the present disclosure as the guide nucleotide sequence-programmable DNA binding protein domain, a Cas9 protein needs to be nuclease inactive. A nuclease-inactive Cas9 protein may interchangeably be referred to as a “dCas9” protein (for nuclease-“dead” Cas9). Methods for generating a Cas9 protein (or a fragment thereof) having an inactive DNA cleavage domain are known (See, e.g., Jinek et al., Science. 337:816-821(2012); Qi et al., (2013) Cell. 28; 152(5):1173-83, each of which are incorporated herein by reference). For example, the DNA cleavage domain of Cas9 is known to include two subdomains, the HNH nuclease subdomain and the RuvC1 subdomain. The HNH subdomain cleaves the strand complementary to the gRNA, whereas the RuvC1 subdomain cleaves the non-complementary strand. Mutations within these subdomains can silence the nuclease activity of Cas9. For example, the mutations D10A and H840A completely inactivate the nuclease activity of S. pyogenes Cas9 (Jinek et al., Science. 337:816-821(2012); Qi et al., Cell. 28; 152(5):1173-83 (2013)).

dCas9 (D10A and H840A)

(SEQ ID NO: 2)

MDKKYSIGLAIGTNSVGWAVITDEYKVPSKKFKVLGNTDRHSIKKNLIGA
LLFDSGETAEATRLKRTARRRYTRRKNRICYLQEIFSNEMAKVDDSFFHR
LEESFLVEEDKKHERHPIFGNIVDEVAYHEKYPTIYHLRKKLVDSTDKAD
LRLIYLALAHMIKFRGHFLIEGDLNPDNSDVDKLFIQLVQTYNQLFEENP
INASGVDAKAILSARLSKSRRLENLIAQLPGEKKNGLFGNLIALSLGLTP
NFKSNFDLAEDAKLQLSKDTYDDDLDNLLAQIGDQYADLFLAAKNLSDAI
LLSDILRVNTEITKAPLSASMIKRYDEHHQDLTLLKALVRQQLPEKYKEI
FFDQSKNGYAGYIDGGASQEEFYKFIKPILEKMDGTEELLVKLNREDLLR
KQRTFDNGSIPHQIHLGELHAILRRQEDFYPFLKDNREKIEKILTFRIPY
YVGPLARGNSRFAWMTRKSEETITPWNFEEVVDKGASAQSFIERMTNFDK
NLPNEKVLPKHSLLYEYFTVYNELTKVKYVTEGMRKPAFLSGEQKKAIVD
LLFKTNRKVTVKQLKEDYFKKIECFDSVEISGVEDRFNASLGTYHDLLKI
IKDKDFLDNEENEDILEDIVLTLTLFEDREMIEERLKTYAHLFDDKVMKQ
LKRRRYTGWGRLSRKLINGIRDKQSGKTILDFLKSDGFANRNFMQLIHDD
SLTFKEDIQKAQVSGQGDSLHEHIANLAGSPAIKKGILQTVKVVDELVKV
MGRHKPENIVIEMARENQTTQKGQKNSRERMKRIEEGIKELGSQILKEHP
VENTQLQNEKLYLYYLQNGRDMYVDQELDINRLSDYDVDAIVPQSFLKDD
SIDNKVLTRSDKNRGKSDNVPSEEVVKKMKNYWRQLLNAKLITQRKFDNL
TKAERGGLSELDKAGFIKRQLVETRQITKHVAQILDSRMNTKYDENDKLI
REVKVITLKSKLVSDFRKDFQFYKVREINNYHHAHDAYLNAVVGTALIKK
YPKLESEFVYGDYKVYDVRKMIAKSEQEIGKATAKYFFYSNIMNFFKTEI
TLANGEIRKRPLIETNGETGEIVWDKGRDFATVRKVLSMPQVNIVKKTEV
QTGGFSKESILPKRNSDKLIARKKDWDPKKYGGFDSPTVAYSVLVVAKVE
KGKSKKLKSVKELLGITIMERSSFEKNPIDFLEAKGYKEVKKDLIIKLPK
YSLFELENGRKRMLASAGELQKGNELALPSKYVNFLYLASHYEKLKGSPE
DNEQKQLFVEQHKHYLDEIIEQISEFSKRVILADANLDKVLSAYNKHRDK
PIREQAENIIHLFTLTNLGAPAAFKYFDTTIDRKRYTSTKEVLDATLIHQ
SITGLYETRIDLSQLGGD
(single underline: HNH domain;
double underline: RuvC domain).

[0087] The dCas9 of the present disclosure encompasses completely inactive Cas9 or partially inactive Cas9. For example, the dCas9 may have one of the two nuclease domain inactivated, while the other nuclease domain remains active. Such a partially active Cas9 may also be referred to as a “Cas9 nickase”, due to its ability to cleave one strand of the targeted DNA sequence. The Cas9 nickase suitable for use in accordance with the present disclosure has an active HNH domain and an inactive RuvC domain and is able to cleave only the strand of the target DNA that is bound by the sgRNA (which is the opposite strand of the strand that is being edited via cytidine deamination). The Cas9 nickase of the present disclosure may comprise mutations that inactivate the RuvC domain, e.g., a D10A mutation. It is to be understood that any mutation that inactivates the RuvC domain may be included in a Cas9 nickase, e.g., insertion, deletion, or single or multiple amino acid substitution in the RuvC domain. In a Cas9 nickase described herein, while the RuvC domain is inactivated, the HNH domain remains activate. Thus, while the Cas9 nickase may comprise mutations other than those that inactivate the RuvC domain (e.g., D10A), those mutations do not affect the activity of the HNH domain. In a non-limiting Cas9 nickase example, the histidine at position 840 remains unchanged. The sequence of an exemplary Cas9 nickase suitable for the present disclosure is provided below.

S. pyogenes Cas9 Nickase (D10A)

(SEQ ID NO: 3)

MDKKYSIGLAIGTNSVGWAVITDEYKVPSKKFKVLGNTDRHSIKKNLIGA
LLFDSGETAEATRLKRTARRRYTRRKNRICYLQEIFSNEMAKVDDSFFHR
LEESFLVEEDKKHERHPIFGNIVDEVAYHEKYPTIYHLRKKLVDSTDKAD
LRLIYLALAHMIKFRGHFLIEGDLNPDNSDVDKLFIQLVQTYNQLFEENP
INASGVDAKAILSARLSKSRRLENLIAQLPGEKKNGLFGNLIALSLGLTP
NFKSNFDLAEDAKLQLSKDTYDDDLDNLLAQIGDQYADLFLAAKNLSDAI
LLSDILRVNTEITKAPLSASMIKRYDEHHQDLTLLKALVRQQLPEKYKEI
FFDQSKNGYAGYIDGGASQEEFYKFIKPILEKMDGTEELLVKLNREDLLR
KQRTFDNGSIPHQIHLGELHAILRRQEDFYPFLKDNREKIEKILTFRIPY
YVGPLARGNSRFAWMTRKSEETITPWNFEEVVDKGASAQSFIERMTNFDK
NLPNEKVLPKHSLLYEYFTVYNELTKVKYVTEGMRKPAFLSGEQKKAIVD
LLFKTNRKVTVKQLKEDYFKKIECFDSVEISGVEDRFNASLGTYHDLLKI
IKDKDFLDNEENEDILEDIVLTLTLFEDREMIEERLKTYAHLFDDKVMKQ
LKRRRYTGWGRLSRKLINGIRDKQSGKTILDFLKSDGFANRNFMQLIHDD
SLTFKEDIQKAQVSGQGDSLHEHIANLAGSPAIKKGILQTVKVVDELVKV
MGRHKPENIVIEMARENQTTQKGQKNSRERMKRIEEGIKELGSQILKEHP
VENTQLQNEKLYLYYLQNGRDMYVDQELDINRLSDYDVDHIVPQSFLKDD
SIDNKVLTRSDKNRGKSDNVPSEEVVKKMKNYWRQLLNAKLITQRKFDNL
TKAERGGLSELDKAGFIKRQLVETRQITKHVAQILDSRMNTKYDENDKLI
REVKVITLKSKLVSDFRKDFQFYKVREINNYHHAHDAYLNAVVGTALIKK
YPKLESEFVYGDYKVYDVRKMIAKSEQEIGKATAKYFFYSNIMNFFKTEI
TLANGEIRKRPLIETNGETGEIVWDKGRDFATVRKVLSMPQVNIVKKTEV
QTGGFSKESILPKRNSDKLIARKKDWDPKKYGGFDSPTVAYSVLVVAKVE
KGKSKKLKSVKELLGITIMERSSFEKNPIDFLEAKGYKEVKKDLIIKLPK
YSLFELENGRKRMLASAGELQKGNELALPSKYVNFLYLASHYEKLKGSPE
DNEQKQLFVEQHKHYLDEIIEQISEFSKRVILADANLDKVLSAYNKHRDK
PIREQAENIIHLFTLTNLGAPAAFKYFDTTIDRKRYTSTKEVLDATLIHQ
SITGLYETRIDLSQLGGD
(single underline: HNH domain;
double underline: RuvC domain)
S. aureus Cas9 Nickase (D10A)

(SEQ ID NO: 4)

MKRNYILGLAIGITSVGYGIIDYETRDVIDAGVRLFKEANVENNEGRRSK
RGARRLKRRRRHRIQRVKKLLFDYNLLTDHSELSGINPYEARVKGLSQKL
SEEEFSAALLHLAKRRGVHNVNEVEEDTGNELSTKEQISRNSKALEEKYV
AELQLERLKKDGEVRGSINRFKTSDYVKEAKQLLKVQKAYHQLDQSFIDT
YIDLLETRRTYYEGPGEGSPFGWKDIKEWYEMLMGHCTYFPEELRSVKYA
YNADLYNALNDLNNLVITRDENEKLEYYEKFQIIENVFKQKKKPTLKQIA
KEILVNEEDIKGYRVTSTGKPEFTNLKVYHDIKDITARKEIIENAELLDQ
IAKILTIYQSSEDIQEELTNLNSELTQEEIEQISNLKGYTGTHNLSLKAI
NLILDELWHTNDNQIAIFNRLKLVPKKVDLSQQKEIPTTLVDDFILSPVV
KRSFIQSIKVINAIIKKYGLPNDIIIELAREKNSKDAQKMINEMQKRNRQ
TNERIEEIIRTTGKENAKYLIEKIKLHDMQEGKCLYSLEAIPLEDLLNNP
FNYEVDHIIPRSVSFDNSFNNKVLVKQEENSKKGNRTPFQYLSSSDSKIS
YETFKKHILNLAKGKGRISKTKKEYLLEERDINRFSVQKDFINRNLVDTR
YATRGLMNLLRSYFRVNNLDVKVKSINGGFTSFLRRKWKFKKERNKGYKH
HAEDALIIANADFIFKEWKKLDKAKKVMENQMFEEKQAESMPEIETEQEY
KEIFITPHQIKHIKDFKDYKYSHRVDKKPNRELINDTLYSTRKDDKGNTL
IVNNLNGLYDKDNDKLKKLINKSPEKLLMYHHDPQTYQKLKLIMEQYGDE
KNPLYKYYEETGNYLTKYSKKDNGPVIKKIKYYGNKLNAHLDITDDYPNS
RNKVVKLSLKPYRFDVYLDNGVYKFVTVKNLDVIKKENYYEVNSKCYEEA
KKLKKISNQAEFIASFYNNDLIKINGELYRVIGVNNDLLNRIEVNMIDIT
YREYLENMNDKRPPRIIKTIASKTQSIKKYSTDILGNLYEVKSKKHPQII
KKG

[0088] It is appreciated that when the term “dCas9” or “nuclease-inactive Cas9” is used herein, it refers to Cas9 variants that are inactive in both HNH and RuvC domains as well as Cas9 nickases. For example, the dCas9 used in the present disclosure may include the amino acid sequence set forth in SEQ ID NO: 2 or SEQ ID NO: 3. In some embodiments, the dCas9 may comprise other mutations that inactivate RuvC or HNH domain. Additional suitable mutations that inactivate Cas9 will be apparent to those of skill in the art based on this disclosure and knowledge in the field, and are within the scope of this disclosure. Such additional exemplary suitable nuclease-inactive Cas9 domains include, but are not limited to, D839A and/or N863A (See, e.g., Prashant et al., Nature Biotechnology. 2013; 31(9): 833-838, which are incorporated herein by reference), or), or K603R (See, e.g., Chavez et al., Nature Methods 12, 326-328, 2015, which is incorporated herein by reference). The term Cas9, dCas9, or Cas9 variant also encompasses Cas9, dCas9, or Cas9 variants from any organism. Also appreciated is that dCas9, Cas9 nickase, or other appropriate Cas9 variants from any organisms may be used in accordance with the present disclosure.

[0089] A “deaminase” refers to an enzyme that catalyzes the removal of an amine group from a molecule, or deamination, for example through hydrolysis. In some embodiments, the deaminase is a cytidine deaminase, catalyzing the deamination of cytidine (C) to uridine (U), deoxycytidine (dC) to deoxyuridine (dU), or 5-methyl-cytidine to thymidine (T, 5-methyl-U), respectively. Subsequent DNA repair mechanisms ensure that a dU is replaced by T, as described in Komor et al (Nature, Programmable editing of a target base in genomic DNA without double-stranded DNA cleavage, 533, 420-424 (2016), which is incorporated herein by reference). In some embodiments, the deaminase is a cytosine deaminase, catalyzing and promoting the conversion of cytosine to uracil (e.g., in RNA) or thymine (e.g., in DNA). In some embodiments, the deaminase is a naturally-occurring deaminase from an organism, such as a human, chimpanzee, gorilla, monkey, cow, dog, rat, or mouse. In some embodiments, the deaminase is a variant of a naturally-occurring deaminase from an organism, and the variants do not occur in nature. For example, in some embodiments, the deaminase or deaminase domain is at least 50%, at least 55%, at least 60%, at least 65%, at least 70%, at least 75% at least 80%, at least 85%, at least 90%, at least 95%, at least 96%, at least 97%, at least 98%, at least 99%, or at least 99.5% identical to a naturally-occurring deaminase from an organism.

[0090] A “cytosine deaminase” refers to an enzyme that catalyzes the chemical reaction “cytosine+H₂O↔uracil+NH₃” or “5-methyl-cytosine+H₂O↔thymine+NH₃.” As it may be apparent from the reaction formula, such chemical reactions result in a C to U/T nucleobase change. In the context of a gene, such nucleotide change, or mutation, may in turn lead to an amino acid change in the protein, which may affect the protein's function, e.g., loss-of-function or gain-of-function. Subsequent DNA repair mechanisms ensure that uracil bases in DNA are replaced by T, as described in Komor et al. (Nature, Programmable editing of a target base in genomic DNA without double-stranded DNA cleavage, 533, 420-424 (2016), which is incorporated herein by reference).

[0091] One exemplary suitable class of cytosine deaminases is the apolipoprotein B mRNA-editing complex (APOBEC) family of cytosine deaminases encompassing eleven proteins that serve to initiate mutagenesis in a controlled and beneficial manner. The apolipoprotein B editing complex 3 (APOBEC3) enzyme provides protection to human cells against a certain HIV-1 strain via the deamination of cytosines in reverse-transcribed viral ssDNA. These cytosine deaminases all require a Zn²⁺-coordinating motif (His-X-Glu-X₂₃₋₂₆-Pro-Cys-X₂₋₄-Cys; SEQ ID NO: 1996) and bound water molecule for catalytic activity. The glutamic acid residue acts to activate the water molecule to a zinc hydroxide for nucleophilic attack in the deamination reaction. Each family member preferentially deaminates at its own particular “hotspot,” for example, WRC (W is A or T, R is A or G) for hAID, or TTC for hAPOBEC3F. A recent crystal structure of the catalytic domain of APOBEC3G revealed a secondary structure comprising a five-stranded β-sheet core flanked by six α-helices, which is believed to be conserved across the entire family. The active center loops have been shown to be responsible for both ssDNA binding and in determining “hotspot” identity. Overexpression of these enzymes has been linked to genomic instability and cancer, thus highlighting the importance of sequence-specific targeting. Another suitable cytosine deaminase is the activation-induced cytidine deaminase (AID), which is responsible for the maturation of antibodies by converting cytosines in ssDNA to uracils in a transcription-dependent, strand-biased fashion.

[0092] The term “base editors” or “nucleobase editors,” as used herein, broadly refer to any of the fusion proteins described herein. In some embodiments, the nucleobase editors are capable of precisely deaminating a target base to convert it to a different base, e.g., the base editor may target C bases in a nucleic acid sequence and convert the C to T base. In some embodiments, the base editor comprises a Cas9 (e.g., dCas9 and nCas9), CasX, CasY, Cpf1, C2c1, C2c2, C2c3, or Argonaute protein fused to a cytidine deaminase. For example, in some embodiments, the base editor may be a cytosine deaminase-dCas9 fusion protein. In some embodiments, the base editor may be a cytosine deaminase-Cas9 nickase fusion protein. In some embodiments, the base editor may be a deaminase-dCas9-UGI fusion protein. In some embodiments, the base editor may be an UGI-deaminase-dCas9 fusion protein. In some embodiments, the base editor may be an UGI-deaminase-Cas9 nickase fusion protein. In some embodiments, the base editor may be an APOBEC1-dCas9-UGI fusion protein. In some embodiments, the base editor may be an APOBEC1-Cas9 nickase-UGI fusion protein. In some embodiments, the base editor may be an APOBEC1-dCpf1-UGI fusion protein. In some embodiments, the base editor may be an APOBEC1-dNgAgo-UGI fusion protein. In some embodiments, the base editor comprises a CasX protein fused to a cytidine deaminase. In some embodiments, the base editor comprises a CasY protein fused to a cytidine deaminase. In some embodiments, the base editor comprises a Cpf1 protein fused to a cytidine deaminase. In some embodiments, the base editor comprises a C2c1 protein fused to a cytidine deaminase. In some embodiments, the base editor comprises a C2c2 protein fused to a cytidine deaminase. In some embodiments, the base editor comprises a C2c3 protein fused to a cytidine deaminase. In some embodiments, the base editor comprises an Argonaute protein fused to a cytidine deaminase. In some embodiments, the fusion protein described herein comprises a Gam protein, a guide nucleotide sequence-programmable DNA binding protein, and a cytidine deaminase domain. In some embodiments, the base editor comprises a Gam protein, fused to a CasX protein, which is fused to a cytidine deaminase. In some embodiments, the base editor comprises a Gam protein, fused to a CasY protein, which is fused to a cytidine deaminase. In some embodiments, the base editor comprises a Gam protein, fused to a Cpf1 protein, which is fused to a cytidine deaminase. In some embodiments, the base editor comprises a Gam protein, fused to a C2c1 protein, which is fused to a cytidine deaminase. In some embodiments, the base editor comprises a Gam protein, fused to a C2c2 protein, which is fused to a cytidine deaminase. In some embodiments, the base editor comprises a Gam protein, fused to a C2c3 protein, which is fused to a cytidine deaminase. In some embodiments, the base editor comprises a Gam protein, fused to an Argonaute protein, which is fused to a cytidine deaminase. In some embodiments, the base editor comprises a Gam protein, fused to a saCas9 protein, which is fused to a cytidine deaminase. Non-limiting exemplary sequences of the nucleobase editors described herein are provided in Example 1, SEQ ID NOs: 293-302. Such nucleobase editors and methods of using them for genome editing have been described in the art, e.g., in U.S. Pat. No. 9,068,179, US Patent Application Publications US 20150166980, US20150166981, US20150166982, US20150166984, and US20150165054, and U.S. Provisional Application Ser. Nos. 62/245,828, 62/279,346, 62/311,763, 62/322,178, 62/357,352, 62/370,700, and 62/398,490, and in Komor et al., Nature, Programmable editing of a target base in genomic DNA without double-stranded DNA cleavage, 533, 420-424 (2016), each of which is incorporated herein by reference.

[0093] The term “target site” or “target sequence” refers to a sequence within a nucleic acid molecule (e.g., a DNA molecule) that is deaminated by the fusion protein provided herein. In some embodiments, the target sequence is a polynucleotide (e.g., a DNA), wherein the polynucleotide comprises a coding strand and a complementary strand. The meaning of a “coding strand” and “complementary strand,” as used herein, is the same as the common meaning of the terms in the art. In some embodiments, the target sequence is a sequence in the genome of a mammal. In some embodiments, the target sequence is a sequence in the genome of a human. In some embodiments, the target sequence is a sequence in the genome of a non-human animal The term “target codon” refers to the amino acid codon that is edited by the base editor and converted to a different codon via deamination. The term “target base” refers to the nucleotide base that is edited by the base editor and converted to a different base via deamination. In some embodiments, the target codon in the coding strand is edited (e.g., deaminated). In some embodiments, the target codon in the complimentary strand is edited (e.g., deaminated).

[0094] The term “uracil glycosylase inhibitor” or “UGI,” as used herein, refers to a protein that is capable of inhibiting a uracil-DNA glycosylase base-excision repair enzyme.

[0095] The term “linker,” as used herein, refers to a chemical group or a molecule linking two molecules or moieties, e.g., two domains of a fusion protein, such as, for example, a nuclease-inactive Cas9 domain and a nucleic acid editing domain (e.g., a deaminase domain). In some embodiments, a linker joins a gRNA binding domain of an RNA-programmable nuclease, including a Cas9 nuclease domain, and a catalytic domain of a nucleic-acid editing domain (e.g., a deaminase domain). In some embodiments, a linker joins a gRNA binding domain of an RNA-programmable nuclease (e.g., Cas9) and a Gam protein. In some embodiments, a linker joins a gRNA binding domain of an RNA-programmable nuclease (e.g., Cas9) and a UGI domain. In some embodiments, a linker joins a UGI domain and a Gam protein. In some embodiments, a linker joins a catalytic domain of a nucleic-acid editing domain (e.g., a deaminase domain) and a UGI domain. In some embodiments, a linker joins a catalytic domain of a nucleic-acid editing domain (e.g., a deaminase domain) and a Gam protein. Typically, the linker is positioned between, or flanked by, two groups, molecules, domains, or other moieties and connected to each one via a covalent bond, thus connecting the two. In some embodiments, the linker is an amino acid or a plurality of amino acids (e.g., a peptide or protein). In some embodiments, the linker is an organic molecule, group, polymer polymer (e.g. a non-natural polymer, non-peptidic polymer), or chemical moiety. In some embodiments, the linker is 2-100 amino acids in length, for example, 2, 3, 4, 5, 6, 7, 8, 9, 10, 11, 12, 13, 14, 15, 16, 17, 18, 19, 20, 21, 22, 23, 24, 25, 26, 27, 28, 29, 30, 30-35, 35-40, 40-45, 45-50, 50-60, 60-70, 70-80, 80-90, 90-100, 100-150, or 150-200 amino acids in length. Longer or shorter linkers are also contemplated.

[0096] The term “mutation,” as used herein, refers to a substitution of a residue within a sequence, e.g., a nucleic acid or amino acid sequence, with another residue, or a deletion or insertion of one or more residues within a sequence. Mutations are typically described herein by identifying the original residue followed by the position of the residue within the sequence and by the identity of the newly substituted residue. Various methods for making the amino acid substitutions (mutations) provided herein are well known in the art, and are provided by, for example, Green and Sambrook, Molecular Cloning: A Laboratory Manual (4^{th} ed., Cold Spring Harbor Laboratory Press, Cold Spring Harbor, N.Y. (2012)).

[0097] The terms “nucleic acid,” and “polynucleotide,” as used herein, refer to a compound comprising a nucleobase and an acidic moiety, e.g., a nucleoside, a nucleotide, or a polymer of nucleotides. Typically, polymeric nucleic acids, e.g., nucleic acid molecules comprising three or more nucleotides are linear molecules, in which adjacent nucleotides are linked to each other via a phosphodiester linkage. In some embodiments, “nucleic acid” refers to individual nucleic acid residues (e.g. nucleotides and/or nucleosides). In some embodiments, “nucleic acid” refers to an oligonucleotide chain comprising three or more individual nucleotide residues. As used herein, the terms “oligonucleotide” and “polynucleotide” can be used interchangeably to refer to a polymer of nucleotides (e.g., a string of at least three nucleotides). In some embodiments, “nucleic acid” encompasses RNA as well as single and/or double-stranded DNA. Nucleic acids may be naturally occurring, for example, in the context of a genome, a transcript, an mRNA, tRNA, rRNA, siRNA, snRNA, a plasmid, cosmid, chromosome, chromatid, or other naturally occurring nucleic acid molecule. On the other hand, a nucleic acid molecule may be a non-naturally occurring molecule, e.g., a recombinant DNA or RNA, an artificial chromosome, an engineered genome, or fragment thereof, or a synthetic DNA, RNA, DNA/RNA hybrid, or including non-naturally occurring nucleotides or nucleosides. Furthermore, the terms “nucleic acid,” “DNA,” “RNA,” and/or similar terms include nucleic acid analogs, e.g., analogs having other than a phosphodiester backbone. Nucleic acids can be purified from natural sources, produced using recombinant expression systems and optionally purified, chemically synthesized, etc. Where appropriate, e.g., in the case of chemically synthesized molecules, nucleic acids can comprise nucleoside analogs such as analogs having chemically modified bases or sugars, and backbone modifications. A nucleic acid sequence is presented in the 5′ to 3′ direction unless otherwise indicated. In some embodiments, a nucleic acid is or comprises natural nucleosides (e.g. adenosine, thymidine, guanosine, cytidine, uridine, deoxyadenosine, deoxythymidine, deoxyguanosine, and deoxycytidine); nucleoside analogs (e.g., 2-aminoadenosine, 2-thiothymidine, inosine, pyrrolo-pyrimidine, 3-methyl adenosine, 5-methylcytidine, 2-aminoadenosine, C5-bromouridine, C5-fluorouridine, C5-iodouridine, C5-propynyl-uridine, C5-propynyl-cytidine, C5-methylcytidine, 2-aminoadenosine, 7-deazaadenosine, 7-deazaguanosine, 8-oxoadenosine, 8-oxoguanosine, 0(6)-methylguanine, and 2-thiocytidine); chemically modified bases; biologically modified bases (e.g., methylated bases); intercalated bases; modified sugars (e.g., 2′-fluororibose, ribose, 2′-deoxyribose, arabinose, and hexose); and/or modified phosphate groups (e.g., phosphorothioates and 5′-N-phosphoramidite linkages).

[0098] The terms “protein,” “peptide,” and “polypeptide” are used interchangeably herein, and refer to a polymer of amino acid residues linked together by peptide (amide) bonds. The terms refer to a protein, peptide, or polypeptide of any size, structure, or function. Typically, a protein, peptide, or polypeptide will be at least three amino acids long. A protein, peptide, or polypeptide may refer to an individual protein or a collection of proteins. One or more of the amino acids in a protein, peptide, or polypeptide may be modified, for example, by the addition of a chemical entity such as a carbohydrate group, a hydroxyl group, a phosphate group, a farnesyl group, an isofarnesyl group, a fatty acid group, a linker for conjugation, functionalization, or other modification, etc. A protein, peptide, or polypeptide may also be a single molecule or may be a multi-molecular complex. A protein, peptide, or polypeptide may be just a fragment of a naturally occurring protein or peptide. A protein, peptide, or polypeptide may be naturally occurring, recombinant, or synthetic, or any combination thereof. The term “fusion protein” as used herein refers to a hybrid polypeptide which comprises protein domains from at least two different proteins. One protein may be located at the amino-terminal (N-terminal) portion of the fusion protein or at the carboxy-terminal (C-terminal) protein thus forming an “amino-terminal fusion protein” or a “carboxy-terminal fusion protein,” respectively. A protein may comprise different domains, for example, a nucleic acid binding domain (e.g., the gRNA binding domain of Cas9 that directs the binding of the protein to a target site) and a nucleic acid cleavage domain or a catalytic domain of a nucleic-acid editing protein. In some embodiments, a protein is in a complex with, or is in association with, a nucleic acid, e.g., RNA. Any of the proteins provided herein may be produced by any method known in the art. For example, the proteins provided herein may be produced via recombinant protein expression and purification, which is especially suited for fusion proteins comprising a peptide linker. Methods for recombinant protein expression and purification are well known, and include those described by Green and Sambrook, Molecular Cloning: A Laboratory Manual (4^{th} ed., Cold Spring Harbor Laboratory Press, Cold Spring Harbor, N.Y. (2012)), which are incorporated herein by reference.

[0099] The term “subject,” as used herein, refers to an individual organism, for example, an individual mammal. In some embodiments, the subject is a human. In some embodiments, the subject is a non-human mammal. In some embodiments, the subject is a non-human primate. In some embodiments, the subject is a rodent (e.g., mouse, rat). In some embodiments, the subject is a domesticated animal. In some embodiments, the subject is a sheep, a goat, a cattle, a cat, or a dog. In some embodiments, the subject is a research animal. In some embodiments, the subject is genetically engineered, e.g., a genetically engineered non-human subject. The subject may be of either sex and at any stage of development.

[0100] The term “recombinant” as used herein in the context of proteins or nucleic acids refers to proteins or nucleic acids that do not occur in nature, but are the product of human engineering. For example, in some embodiments, a recombinant protein or nucleic acid molecule comprises an amino acid or nucleotide sequence that comprises at least one, at least two, at least three, at least four, at least five, at least six, or at least seven mutations as compared to any naturally occurring sequence. The fusion proteins (e.g., base editors) described herein are made recombinantly. Recombinant technology is familiar to those skilled in the art.

[0101] An “intron” refers to any nucleotide sequence within a gene that is removed by RNA splicing during maturation of the final RNA product. The term intron refers to both the DNA sequence within a gene and the corresponding sequence in RNA transcripts. Sequences that are joined together in the final mature RNA after RNA splicing are exons. Introns are found in the genes of most organisms and many viruses, and can be located in a wide range of genes, including those that generate proteins, ribosomal RNA (rRNA), and transfer RNA (tRNA). When proteins are generated from intron-containing genes, RNA splicing takes place as part of the RNA processing pathway that follows transcription and precedes translation.

[0102] An “exon” refers to any part of a gene that will become a part of the final mature RNA produced by that gene after introns have been removed by RNA splicing. The term exon refers to both the DNA sequence within a gene and to the corresponding sequence in RNA transcripts. In RNA splicing, introns are removed and exons are covalently joined to one another as part of generating the mature messenger RNA.

[0103] “Splicing” refers to the processing of a newly synthesized messenger RNA transcript (also referred to as a primary mRNA transcript). After splicing, introns are removed and exons are joined together (ligated) for form mature mRNA molecule containing a complete open reading frame that is decoded and translated into a protein. For nuclear-encoded genes, splicing takes place within the nucleus either co-transcriptionally or immediately after transcription. The molecular mechanism of RNA splicing has been extensively described, e.g., in Pagani et al., Nature Reviews Genetics 5, 389-396, 2004; Clancy et al., Nature Education 1 (1): 31, 2011; Cheng et al., Molecular Genetics and Genomics 286 (5-6): 395-410, 2014; Taggart et al., Nature Structural & Molecular Biology 19 (7): 719-2, 2012, the contents of each of which are incorporated herein by reference. One skilled in the art is familiar with the mechanism of RNA splicing.

[0104] “Alternative splicing” refers to a regulated process during gene expression that results in a single gene coding for multiple proteins. In this process, particular exons of a gene may be included within or excluded from the final, processed messenger RNA (mRNA) produced from that gene. Consequently, the proteins translated from alternatively spliced mRNAs will contain differences in their amino acid sequence and, often, in their biological functions. Notably, alternative splicing allows the human genome to direct the synthesis of many more proteins than would be expected from its 20,000 protein-coding genes. Alternative splicing is sometimes also termed differential splicing. Alternative splicing occurs as a normal phenomenon in eukaryotes, where it greatly increases the biodiversity of proteins that can be encoded by the genome; in humans, ˜95% of multi-exonic genes are alternatively spliced. There are numerous modes of alternative splicing observed, of which the most common is exon skipping. In this mode, a particular exon may be included in mRNAs under some conditions or in particular tissues, and omitted from the mRNA in others. Abnormal variations in splicing are also implicated in disease; a large proportion of human genetic disorders result from splicing variants. Abnormal splicing variants are also thought to contribute to the development of cancer, and splicing factor genes are frequently mutated in different types of cancer. The regulation of alternative splicing is also described in the art, e.g., in Douglas et al., Annual Review of Biochemistry 72 (1): 291-336, 2003; Pan et al., Nature Genetics 40 (12): 1413-1415, 2008; Martin et al., Nature Reviews 6 (5): 386-398, 2005; Skotheim et al., The International Journal of Biochemistry & Cell Biology 39 (7-8): 1432-49, 2007, each of which is incorporated herein by reference.

[0105] A “coding frame” or “open reading frame” refers to a stretch of codons that encodes a polypeptide. Since DNA is interpreted in groups of three nucleotides (codons), a DNA strand has three distinct reading frames. The double helix of a DNA molecule has two anti-parallel strands so, with the two strands having three reading frames each, there are six possible frame translations. A functional protein may be produced when translation proceeds in the correct coding frame. An insertion or a deletion of one or two bases in the open reading frame causes a shift in the coding frame that is also referred to as a “frameshift mutation.” A frameshift mutation typical results in premature translation termination and/or truncated or non-functional protein.

[0106] These and other exemplary substituents are described in more detail in the Detailed Description, Examples, and Claims. The invention is not intended to be limited in any manner by the above exemplary listing of substituents.

### DETAILED DESCRIPTION OF CERTAIN EMBODIMENTS

[0107] Disclosed herein are novel genome/base-editing systems, methods, and compositions for generating engineered and naturally-occurring protective variants of the liver protein Proprotein Convertase Subtilisin/Kexin Type 9 (PCSK9) to boost LDL receptor-mediated clearance of LDL cholesterol, alone and in combination with other protective gene variants that could synergistically improve circulating cholesterol and triglyceride levels.

[0108] Proprotein convertase subtilisin-kexin type 9 (PCSK9), also known as neural apoptosis-regulated convertase 1 (“NARC-I”), is a proteinase K-like subtilase identified as the 9th member of the secretory subtilase family. The gene for PCSK9 localizes to human chromosome Ip33-p34.3. PCSK9 is expressed in cells capable of proliferation and differentiation including, for example, hepatocytes, kidney mesenchymal cells, intestinal ileum, and colon epithelia as well as embryonic brain telencephalon neurons. See, e.g., Seidah et al., 2003 PNAS 100:928-933, which is incorporated herein by reference.

[0109] Original synthesis of PCSK9 is in the form of an inactive enzyme precursor, or zymogen, of 72-kDa, which undergoes autocatalytic, intramolecular processing in the endoplasmic reticulum (“ER”) to activate its functionality. This internal processing event has been reported to occur at the SSVFAQ↓SIP motif, and has been reported as a requirement of exit from the ER. “↓” indicates cleavage site. See, Benjannet et al., 2004 J. Biol. Chem. 279:48865-48875, and Seidah et al., 2003 PNAS 100:928-933, each of which are incorporated herein by reference. The cleaved protein is then secreted. The cleaved peptide remains associated with the activated and secreted enzyme. The gene sequence for human PCSK9, which is ˜22-kb long with 12 exons encoding a 692 amino acid protein, can be found, for example, at Deposit No. NP_777596.2. Human, mouse and rat PCSK9 nucleic acid sequences have been deposited; see, e.g., GenBank Accession Nos.: AX127530 (also AX207686), AX207688, and AX207690, respectively. The translated protein contains a signal peptide in the NH2-terminus, and in cells and tissues an about 74 kDa zymogen (precursor) form of the full-length protein is found in the endoplasmic reticulum. During initial processing in the cell, the about 14 kDa prodomain peptide is autocatalytically cleaved to yield a mature about 60 kDa protein containing the catalytic domain and a C-terminal domain often referred to as the cysteine-histidine rich domain (CHRD). This about 60 kDa form of PCSK9 is secreted from liver cells. The secreted form of PCSK9 appears to be the physiologically active species, although an intracellular functional role of the about 60 kDa form has not been ruled out.

[0110] Wild Type PCSK9 Gene (>gi|299523249|ref|NM_174936.3|Homo sapiens proprotein convertase subtilisin/kexin type 9 (PCSK9), transcript variant 1, SEQ ID NO: 1990)

GTCCGATGGGGCTCTGGTGGCGTGATCTGCGCGCCCCAGGCGTCAAGCACCCACAC
CCTAGAAGGTTTCCGCAGCGACGTCGAGGCGCTCATGGTTGCAGGCGGGCGCCGCC
GTTCAGTTCAGGGTCTGAGCCTGGAGGAGTGAGCCAGGCAGTGAGACTGGCTCGGG
CGGGCCGGGACGCGTCGTTGCAGCAGCGGCTCCCAGCTCCCAGCCAGGATTCCGCG
CGCCCCTTCACGCGCCCTGCTCCTGAACTTCAGCTCCTGCACAGTCCTCCCCACCGC
AAGGCTCAAGGCGCCGCCGGCGTGGACCGCGCACGGCCTCTAGGTCTCCTCGCCAG
GACAGCAACCTCTCCCCTGGCCCTCATGGGCACCGTCAGCTCCAGGCGGTCCTGGTG
GCCGCTGCCACTGCTGCTGCTGCTGCTGCTGCTCCTGGGTCCCGCGGGCGCCCGTGC
GCAGGAGGACGAGGACGGCGACTACGAGGAGCTGGTGCTAGCCTTGCGTTCCGAGG
AGGACGGCCTGGCCGAAGCACCCGAGCACGGAACCACAGCCACCTTCCACCGCTGC
GCCAAGGATCCGTGGAGGTTGCCTGGCACCTACGTGGTGGTGCTGAAGGAGGAGAC
CCACCTCTCGCAGTCAGAGCGCACTGCCCGCCGCCTGCAGGCCCAGGCTGCCCGCCG
GGGATACCTCACCAAGATCCTGCATGTCTTCCATGGCCTTCTTCCTGGCTTCCTGGTG
AAGATGAGTGGCGACCTGCTGGAGCTGGCCTTGAAGTTGCCCCATGTCGACTACATC
GAGGAGGACTCCTCTGTCTTTGCCCAGAGCATCCCGTGGAACCTGGAGCGGATTACC
CCTCCACGGTACCGGGCGGATGAATACCAGCCCCCCGACGGAGGCAGCCTGGTGGA
GGTGTATCTCCTAGACACCAGCATACAGAGTGACCACCGGGAAATCGAGGGCAGGG
TCATGGTCACCGACTTCGAGAATGTGCCCGAGGAGGACGGGACCCGCTTCCACAGA
CAGGCCAGCAAGTGTGACAGTCATGGCACCCACCTGGCAGGGGTGGTCAGCGGCCG
GGATGCCGGCGTGGCCAAGGGTGCCAGCATGCGCAGCCTGCGCGTGCTCAACTGCC
AAGGGAAGGGCACGGTTAGCGGCACCCTCATAGGCCTGGAGTTTATTCGGAAAAGC
CAGCTGGTCCAGCCTGTGGGGCCACTGGTGGTGCTGCTGCCCCTGGCGGGTGGGTAC
AGCCGCGTCCTCAACGCCGCCTGCCAGCGCCTGGCGAGGGCTGGGGTCGTGCTGGT
CACCGCTGCCGGCAACTTCCGGGACGATGCCTGCCTCTACTCCCCAGCCTCAGCTCC
CGAGGTCATCACAGTTGGGGCCACCAATGCCCAAGACCAGCCGGTGACCCTGGGGA
CTTTGGGGACCAACTTTGGCCGCTGTGTGGACCTCTTTGCCCCAGGGGAGGACATCA
TTGGTGCCTCCAGCGACTGCAGCACCTGCTTTGTGTCACAGAGTGGGACATCACAGG
CTGCTGCCCACGTGGCTGGCATTGCAGCCATGATGCTGTCTGCCGAGCCGGAGCTCA
CCCTGGCCGAGTTGAGGCAGAGACTGATCCACTTCTCTGCCAAAGATGTCATCAATG
AGGCCTGGTTCCCTGAGGACCAGCGGGTACTGACCCCCAACCTGGTGGCCGCCCTGC
CCCCCAGCACCCATGGGGCAGGTTGGCAGCTGTTTTGCAGGACTGTATGGTCAGCAC
ACTCGGGGCCTACACGGATGGCCACAGCCGTCGCCCGCTGCGCCCCAGATGAGGAG
CTGCTGAGCTGCTCCAGTTTCTCCAGGAGTGGGAAGCGGCGGGGCGAGCGCATGGA
GGCCCAAGGGGGCAAGCTGGTCTGCCGGGCCCACAACGCTTTTGGGGGTGAGGGTG
TCTACGCCATTGCCAGGTGCTGCCTGCTACCCCAGGCCAACTGCAGCGTCCACACAG
CTCCACCAGCTGAGGCCAGCATGGGGACCCGTGTCCACTGCCACCAACAGGGCCAC
GTCCTCACAGGCTGCAGCTCCCACTGGGAGGTGGAGGACCTTGGCACCCACAAGCC
GCCTGTGCTGAGGCCACGAGGTCAGCCCAACCAGTGCGTGGGCCACAGGGAGGCCA
GCATCCACGCTTCCTGCTGCCATGCCCCAGGTCTGGAATGCAAAGTCAAGGAGCATG
GAATCCCGGCCCCTCAGGAGCAGGTGACCGTGGCCTGCGAGGAGGGCTGGACCCTG
ACTGGCTGCAGTGCCCTCCCTGGGACCTCCCACGTCCTGGGGGCCTACGCCGTAGAC
AACACGTGTGTAGTCAGGAGCCGGGACGTCAGCACTACAGGCAGCACCAGCGAAGG
GGCCGTGACAGCCGTTGCCATCTGCTGCCGGAGCCGGCACCTGGCGCAGGCCTCCC
AGGAGCTCCAGTGACAGCCCCATCCCAGGATGGGTGTCTGGGGAGGGTCAAGGGCT
GGGGCTGAGCTTTAAAATGGTTCCGACTTGTCCCTCTCTCAGCCCTCCATGGCCTGG
CACGAGGGGATGGGGATGCTTCCGCCTTTCCGGGGCTGCTGGCCTGGCCCTTGAGTG
GGGCAGCCTCCTTGCCTGGAACTCACTCACTCTGGGTGCCTCCTCCCCAGGTGGAGG
TGCCAGGAAGCTCCCTCCCTCACTGTGGGGCATTTCACCATTCAAACAGGTCGAGCT
GTGCTCGGGTGCTGCCAGCTGCTCCCAATGTGCCGATGTCCGTGGGCAGAATGACTT
TTATTGAGCTCTTGTTCCGTGCCAGGCATTCAATCCTCAGGTCTCCACCAAGGAGGC
AGGATTCTTCCCATGGATAGGGGAGGGGGCGGTAGGGGCTGCAGGGACAAACATCG
TTGGGGGGTGAGTGTGAAAGGTGCTGATGGCCCTCATCTCCAGCTAACTGTGGAGA
AGCCCCTGGGGGCTCCCTGATTAATGGAGGCTTAGCTTTCTGGATGGCATCTAGCCA
GAGGCTGGAGACAGGTGCGCCCCTGGTGGTCACAGGCTGTGCCTTGGTTTCCTGAGC
CACCTTTACTCTGCTCTATGCCAGGCTGTGCTAGCAACACCCAAAGGTGGCCTGCGG
GGAGCCATCACCTAGGACTGACTCGGCAGTGTGCAGTGGTGCATGCACTGTCTCAGC
CAACCCGCTCCACTACCCGGCAGGGTACACATTCGCACCCCTACTTCACAGAGGAA
GAAACCTGGAACCAGAGGGGGCGTGCCTGCCAAGCTCACACAGCAGGAACTGAGCC
AGAAACGCAGATTGGGCTGGCTCTGAAGCCAAGCCTCTTCTTACTTCACCCGGCTGG
GCTCCTCATTTTTACGGGTAACAGTGAGGCTGGGAAGGGGAACACAGACCAGGAAG
CTCGGTGAGTGATGGCAGAACGATGCCTGCAGGCATGGAACTTTTTCCGTTATCACC
CAGGCCTGATTCACTGGCCTGGCGGAGATGCTTCTAAGGCATGGTCGGGGGAGAGG
GCCAACAACTGTCCCTCCTTGAGCACCAGCCCCACCCAAGCAAGCAGACATTTATCT
TTTGGGTCTGTCCTCTCTGTTGCCTTTTTACAGCCAACTTTTCTAGACCTGTTTTGCTT
TTGTAACTTGAAGATATTTATTCTGGGTTTTGTAGCATTTTTATTAATATGGTGACTT
TTTAAAATAAAAACAAACAAACGTTGTCCTAACAAAAAAAAAAAAAAAAAAAAA
Human PCSK9 Amino Acid Sequence
(SEQ ID NO: 1991)
MGTVSSRRSWWPLPLLLLLLLLLGPAGARAQEDEDGDYEELVLALRSEEDGLAEAPEH
GTTATFHRCAKDPWRLPGTYVVVLKEETHLSQSERTARRLQAQAARRGYLTKILHVFH
GLLPGFLVKMSGDLLELALKLPHVDYIEEDSSVFAQSIPWNLERITPPRYRADEYQPPDG
GSLVEVYLLDTSIQSDHREIEGRVMVTDFENVPEEDGTRFHRQASKCDSHGTHLAGVVS
GRDAGVAKGASMRSLRVLNCQGKGTVSGTLIGLEFIRKSQLVQPVGPLVVLLPLAGGYS
RVLNAACQRLARAGVVLVTAAGNFRDDACLYSPASAPEVITVGATNAQDQPVTLGTLG
TNFGRCVDLFAPGEDIIGASSDCSTCFVSQSGTSQAAAHVAGIAAMMLSAEPELTLAELR
QRLIHFSAKDVINEAWFPEDQRVLTPNLVAALPPSTHGAGWQLFCRTVWSAHSGPTRM
ATAVARCAPDEELLSCSSFSRSGKRRGERMEAQGGKLVCRAHNAFGGEGVYAIARCCL
LPQANCSVHTAPPAEASMGTRVHCHQQGHVLTGCSSHWEVEDLGTHKPPVLRPRGQPN
QCVGHREASIHASCCHAPGLECKVKEHGIPAPQEQVTVACEEGWTLTGCSALPGTSHVL
GAYAVDNTCVVRSRDVSTTGSTSEGAVTAVAICCRSRHLAQASQELQ
Mouse PCSK 9 Amino Acid Sequence
(SEQ ID NO: 1992)
MGTHCSAWLRWPLLPLLPPLLLLLLLLCPTGAGAQDEDGDYEELMLALPSQEDGLADE
AAHVATATFRRCSKEAWRLPGTYIVVLMEETQRLQIEQTAHRLQTRAARRGYVIKVLHI
FYDLFPGFLVKMSSDLLGLALKLPHVEYIEEDSFVFAQSIPWNLERIIPAWHQTEEDRSPD
GSSQVEVYLLDTSIQGAHREIEGRVTITDFNSVPEEDGTRFHRQASKCDSHGTHLAGVVS
GRDAGVAKGTSLHSLRVLNCQGKGTVSGTLIGLEFIRKSQLIQPSGPLVVLLPLAGGYSR
ILNAACRHLARTGVVLVAAAGNFRDDACLYSPASAPEVITVGATNAQDQPVTLGTLGT
NFGRCVDLFAPGKDIIGASSDCSTCFMSQSGTSQAAAHVAGIVARMLSREPTLTLAELRQ
RLIHFSTKDVINMAWFPEDQQVLTPNLVATLPPSTHETGGQLLCRTVWSAHSGPTRTAT
ATARCAPEEELLSCSSFSRSGRRRGDWIEAIGGQQVCKALNAFGGEGVYAVARCCLVPR
ANCSIHNTPAARAGLETHVHCHQKDHVLTGCSFHWEVEDLSVRRQPALRSRRQPGQCV
GHQAASVYASCCHAPGLECKIKEHGISGPSEQVTVACEAGWTLTGCNVLPGASLTLGAY
SVDNLCVARVHDTARADRTSGEATVAAAICCRSRPSAKASWVQ
Rat PCSK9 Amino Acid Sequence
(SEQ ID NO: 1993)
MGIRCSTWLRWPLSPQLLLLLLLCPTGSRAQDEDGDYEELMLALPSQEDSLVDEASHVA
TATFRRCSKEAWRLPGTYVVVLMEETQRLQVEQTAHRLQTWAARRGYVIKVLHVFYD
LFPGFLVKMSSDLLGLALKLPHVEYIEEDSLVFAQSIPWNLERIIPAWQQTEEDSSPDGSS
QVEVYLLDTSIQSGHREIEGRVTITDFNSVPEEDGTRFHRQASKCDSHGTHLAGVVSGRD
AGVAKGTSLHSLRVLNCQGKGTVSGTLIGLEFIRKSQLIQPSGPLVVLLPLAGGYSRILNT
ACQRLARTGVVLVAAAGNFRDDACLYSPASAPEVITVGATNAQDQPVTLGTLGTNFGR
CVDLFAPGKDIIGASSDCSTCYMSQSGTSQAAAHVAGIVAMMLNRDPALTLAELRQRLI
LFSTKDVINMAWFPEDQRVLTPNRVATLPPSTQETGGQLLCRTVWSAHSGPTRTATATA
RCAPEEELLSCSSFSRSGRRRGDRIEAIGGQQVCKALNAFGGEGVYAVARCCLLPRVNC
SIHNTPAARAGPQTPVHCHQKDHVLTGCSFHWEVENLRAQQQPLLRSRHQPGQCVGHQ
EASVHASCCHAPGLECKIKEHGIAGPAEQVTVACEAGWTLTGCNVLPGASLPLGAYSVD
NVCVARIRDAGRADRTSEEATVAAAICCRSRPSAKASWVHQ

[0111] PCSK9 has been ascribed a role in the differentiation of hepatic and neuronal cells, is highly expressed in embryonic liver, and has been strongly implicated in cholesterol homeostasis. Recent studies suggest a specific role in cholesterol biosynthesis or uptake for PCSK9. In a study of cholesterol-fed rats, Maxwell et al. found that PCSK9 was downregulated in a similar manner as three other genes involved in cholesterol biosynthesis, Maxwell et al., 2003 J Lipid Res. 44:2109-2119, which are incorporated herein by reference. Interestingly, as well, the expression of PCSK9 was regulated by sterol regulatory element-binding proteins (“SREBP”), as seen with other genes involved in cholesterol metabolism. These findings were later supported by a study of PCSK9 transcriptional regulation which demonstrated that such regulation was quite typical of other genes implicated in lipoprotein metabolism; Dubuc et al., 2004 Arterioscler. Thromb. Vase. Biol 24:1454-1459, which is incorporated herein by reference. PCSK9 expression was upregulated by statins in a manner attributed to the cholesterol-lowering effects of the drugs. Further, the PCSK9 promoters possessed two conserved sites involved in cholesterol regulation, a sterol regulatory element and a SpI site. Adenoviral expression of PCSK9 has been shown to lead to a notable time-dependent increase in circulating LDL (Benjannet et al., 2004 J Biol Chem. 279:48865-48875, which is incorporated herein by reference). More, mice deleted of the PCSK9 gene have increased levels of hepatic LDL receptors and more rapidly clear LDL from the plasma; Rashid et al., 2005 Proc. Natl Acad. Sci. USA 102:5374-5379, which is incorporated herein by reference.

[0112] Recently it was reported that medium from HepG2 cells transiently transfected with PCSK9 reduced the amount of cell surface LDLR and internalization of LDL when transferred to untransfected HepG2 cells; see Cameron et al., 2006 Human Mol Genet. 15:1551-1558, which is incorporated herein by reference. It was concluded that either PCSK9 or a factor acted upon by PCSK9 is secreted and is capable of degrading LDLR both in transfected and untransfected cells. More recently, it was demonstrated that purified PCSK9 added to the medium of HepG2 cells had the effect of reducing the number of cell-surface LDLRs in a dose- and time-dependent manner; Lagace et al., 2006 J Clin. Invest. 116:2995-3005, which are incorporated herein by reference.

[0113] Numerous PCSK9 variants are disclosed and/or claimed in several patent publications including, but not limited to the following: PCT Publication Nos. WO2001031007, WO2001057081, WO2002014358, WO2001098468, WO2002102993, WO2002102994, WO2002046383, WO2002090526, WO2001077137, and WO2001034768; US Publication Nos. US 2004/0009553 and US 2003/0119038, and European Publication Nos. EP 1 440 981, EP 1 067 182, and EP 1 471 152, each of which are incorporated herein by reference.

[0114] Several mutant forms of PCSK9 are well characterized, including S127R, N157K, F216L, R218S, and D374Y, with S127R, F216L, and D374Y being linked to autosomal dominant hypercholesterolemia (ADH). Benjannet et al. (J. Biol. Chem., 279(47):48865-48875 (2004)) demonstrated that the S127R and D374Y mutations result in a significant decrease in the level of pro-PCSK9 processed in the ER to form the active secreted zymogen. As a consequence it is believed that wild-type PCSK9 increases the turnover rate of the LDL receptor causing inhibition of LDL clearance (Maxwell et al., PNAS, 102(6):2069-2074 (2005); Benjannet et al., and Lalanne et al), while PCSK9 autosomal dominant mutations result in increased levels of LDLR, increased clearance of circulating LDL, and a corresponding decrease in plasma cholesterol levels. See, Rashid et al., PNAS, 102(15):5374-5379 (2005); Abifadel et al., 2003 Nature Genetics 34:154-156; Timms et al., 2004 Hum. Genet. 114:349-353; and Leren, 2004 Clin. Genet. 65:419-422, each of which are incorporated herein by reference.

[0115] A later-published study on the S127R mutation of Abifadel et al., reported that patients carrying such a mutation exhibited higher total cholesterol and apoB100 in the plasma attributed to (1) an overproduction of apoB100-containing lipoproteins, such as low density lipoprotein (“LDL”), very low density lipoprotein (“VLDL”) and intermediate density lipoprotein (“IDL”), and (2) an associated reduction in clearance or conversion of said lipoproteins. Together, the studies referenced above evidence the fact that PCSK9 plays a role in the regulation of LDL production. Expression or upregulation of PCSK9 is associated with increased plasma levels of LDL cholesterol, and inhibition or the lack of expression of PCSK9 is associated with low LDL cholesterol plasma levels. Significantly, lower levels of LDL cholesterol associated with sequence variations in PCSK9 have conferred protection against coronary heart disease; Cohen et al., 2006 N. Engl. J. Med. 354:1264-1272.

[0116] Lalanne et al. demonstrated that LDL catabolism was impaired and apolipoprotein B-containing lipoprotein synthesis was enhanced in two patients harboring S127R mutations in PCSK9 (J. Lipid Research, 46:1312-1319 (2005)). Sun et al. also provided evidence that mutant forms of PCSK9 are also the cause of unusually severe dominant hypercholesterolaemia as a consequence of its effect of increasing apolipoprotein B secretion (Sun et al., Hum. Mol. Genet., 14(9):1161-1169 (2005)). These results were consistent with earlier results which demonstrated adenovirus-mediated overexpression of PCSK9 in mice results in severe hypercholesteromia due to drastic decreases in the amount of LDL receptor Dubuc et al., Thromb. Vasc. Biol., 24:1454-1459 (2004), in addition to results demonstrating mutant forms of PCSK9 also reduce the level of LDL receptor (Park et al., J. Biol. Chem., 279:50630-50638 (2004). The overexpression of PCSK9 in cell lines, including liver-derived cells, and in livers of mice in vivo, results in a pronounced reduction in LDLR protein levels and LDLR functional activity without changes in LDLR mRNA level (Maxwell et al., Proc. Nat. Amer. Sci., 101:7100-7105 (2004); Benjannet S. et al., J. Bio. Chem. 279: 48865-48875 (2004)).

[0117] Various therapeutic approaches to the inhibition of PSCK9 have been proposed, including: inhibition of PSCK9 synthesis by gene silencing agents, e.g., RNAi; inhibition of PCSK9 binding to LDLR by monoclonal antibodies, small peptides or adnectins; and inhibition of PCSK9 autocatalytic processing by small molecule inhibitors. These strategies have been described in Hedrick et al., Curr Opin Investig Drugs 2009; 10:938-46; Hooper et al., Expert Opin Biol Ther, 2013; 13:429-35; Rhainds et al., Clin Lipid, 2012; 7:621-40; Seidah et al; Expert Opin Ther Targets 2009; 13:19-28; and Seidah et al., Nat Rev Drug Discov 2012; 11:367-83, each of which are incorporated herein by reference.

### Strategies for Generating PCSK9 Mutants

[0118] Some aspects of the present disclosure provide systems, compositions, and methods of editing polynucleotides encoding the PCSK9 protein to introducing mutations into the PCSK9 gene. The gene editing methods described herein, rely on nucleobase editors as described in U.S. Pat. No. 9,068,179, US Patent Application Publications US20150166980, US20150166981, US20150166982, US20150166984, and US20150165054, and U.S. Provisional Applications 62/245,828, 62/279,346, 62/311,763, 62/322,178, 62/357,352, 62/370,700, and 62/398,490, and in Komor et al., Nature, Programmable editing of a target base in genomic DNA without double-stranded DNA cleavage, 533, 420-424 (2016), each of which are incorporated herein by reference.

[0119] The nucleobase editors highly efficient at precisely editing a target base in the PCSK9 gene and a DNA double stand break is not necessary for the gene editing, thus reducing genome instability and preventing possible oncogenic modifications that may be caused by other genome editing methods. The nucleobase editors described herein may be programmed to target and modify a single base. In some embodiments, the target base is a cytosine (C) base and may be converted to a thymine (T) base via deamination by the nucleobase editor.

[0120] To edit the polynucleotide encoding the PCSK9 protein, the polynucleotide is contacted with a nucleobase editors described herein. In some embodiments, the PCSK9-encoding polynucleotide is contacted with a nucleobase editor and a guide nucleotide sequence, wherein the guide nucleotide sequence targets the nucleobase editor the target base (e.g., a C base) in the PCSK9-encoding polynucleotide.

[0121] In some embodiments, the PCSK9-encoding polynucleotide is the PCSK9 gene locus in the genomic DNA of a cell. In some embodiments, the cell is a cultured cell. In some embodiments, the cell is in vivo. In some embodiments, the cell is in vitro. In some embodiments, the cell is ex vivo. In some embodiments, the cell is from a mammal. In some embodiments, the mammal is a human. In some embodiments, the mammal is a rodent. In some embodiments, the rodent is a mouse. In some embodiments, the rodent is a rat.

[0122] As would be understood be those skilled in the art, the PCSK9-encoding polynucleotide may be a DNA molecule comprising a coding strand and a complementary strand, e.g., the PCSK9 gene locus in a genome. As such, the PCSK9-encoding polynucleotide may also include coding regions (e.g., exons) and non-coding regions (e.g., introns of splicing sites). In some embodiments, the target base (e.g., a C base) is located in the coding region (e.g., an exon) of the PCSK9-encoding polynucleotide (e.g., the PCSK9 gene locus). As such, the conversion of a base in the coding region may result in an amino acid change in the PCSK9 protein sequence, i.e., a mutation. In some embodiments, the mutation is a loss of function mutation. In some embodiments, the loss-of-function mutation is a naturally occurring loss-of-function mutation, e.g., G106R, L253F, A443T, R93C, etc. In some embodiments, the loss-of-function mutation is engineered (i.e., not naturally occurring), e.g., G24D, S47F, R46H, S153N, H193Y, etc.

[0123] In some embodiments, the target base is located in a non-coding region of the PCSK9 gene, e.g., in an intron or a splicing site. In some embodiments, a target base is located in a splicing site and the editing of such target base causes alternative splicing of the PSCK9 mRNA. In some embodiments, the alternative splicing leads to leading to loss-of-function PCSK9 mutants. In some embodiments, the alternative splicing leads to the introduction of a premature stop codon in a PSCK9 mRNA, resulting in truncated and unstable PCSK9 proteins. In some embodiments, PCSK9 mutants that are defective in folding are produced.

[0124] PCSK9 variants that are particularly useful in creating using the present disclosure are loss-of-function variants that may boost LDL receptor-mediated clearance of LDL cholesterol, alone or in combination with other genes involved in the pathway, e.g., APOC3, LDL-R, or Idol. In some embodiments, the PCKS9 loss-of-function variants produced using the methods of the present disclosure express efficiently in a cell. In some embodiments, the PCKS9 loss-of-function variants produced using the methods of the present disclosure is activated and exported to engage the clathrin-coated pits from unmodified cells in a paracrine mechanism, thus competing with the wild-type PCSK9 protein. In some embodiments, the PCSK9 loss-of-function variant comprises mutations in residues in the LDL-R bonding region that make direct contact with the LDL-R protein. In some embodiments, the residues in the LDL-R bonding region that make direct contact with the LDL-R protein are selected from the group consisting of R194, R237, F379, 5372, D374, D375, D378, R46, R237, and A443.

[0125] As described herein, a loss-of-function PCSK9 variant, may have reduced activity compared to a wild type PCSK9 protein. PCSK9 activity refers to any known biological activity of the PCSK9 protein in the art. For example, in some embodiments, PCSK9 activity refers to its protease activity. In some embodiments, PCSK9 activity refers to its ability to be secreted through the cellular secretory pathway. In some embodiments, PCSK9 activity refers to its ability to act as a protein-binding adaptor in clathrin-coated vesicles. In some embodiments, PCSK9 activity refers to its ability to interact with LDL receptor. In some embodiments, PCSK9 activity refers to its ability to prevent LDL receptor recycling. These examples are not meant to be limiting.

[0126] In some embodiments, the activity of a loss-of-function PCSK9 variant may be reduced by at lead 20%, at least 30%, at least 40%, at least 50%, at least 60%, at least 70%, at least 80%, at least 90%, at least 99%, or more. In some embodiments, the loss-of-function PCSK9 variant has no more than 50%, no more than 40%, no more than 30%, no more than 20%, no more than 10%, no more than 5%, no more than 1% or less activity compared to a wild type PCSK9 protein. Non-limiting, exemplary assays for determining PCSK9 activity have been described in the art, e.g., in US Patent Application Publication US20120082680, which are incorporated herein by reference.

[0127] To edit the PCSK9 gene, the PCSK9 gene (a polynucleotide molecule) may contact the nucleobase editor, wherein the nucleobase editor binds to its target sequence and edits the desired base. For example, the nucleobase editor may be expressed in a cell where PCSK9 gene editing is desired (e.g., a liver cell), to thereby allowing contact of the PCSK9 gene with the nucleobase editor. In some embodiments, the binding of the nucleobase editor to its target sequence in the PCSK9 is mediated by a guide nucleotide sequence, e.g., a nucleotide molecule comprising a nucleotide sequence that is complementary to one of the strands of the target sequence in the PCSK9 gene. Thus, by designing the guide nucleotide sequence, the nucleobase editor may be programmed to edit any target base in the PCSK9 gene. In some embodiments, the guide nucleotide sequence is co-expressed with the nucleobase editor in a cell where editing is desired.

[0128] Provided herein are non-limiting, exemplary PCSK9 loss-of-function variants that may be produced via base editing (Table 1 and FIG. 1) and strategies for making them.

TABLE 1
Exemplary Loss-of-Function PCSK9 Mutations

| | | Effect on PCSK9 |
|---|---|---|
| Natural variants | Engineered variants | function/structure |
| G106R, L253F, N354I, Q152H | D186N, H226Y, S386L, | prevent autoactivation |
| | A290V/T, S153N | |
| R46L, R237W | R46C, R46H, R237Q | loss-of-function, but normal |
| | | expression |
| A443T, Q219E | A220V/T | faster protease inactivation |
| R46L, R237W | R46C/H, H193Y, R194Q/W, | diminished affinity |
| | N295A, S372F, S373N, D374N, | for LDL-R |
| | S376N, C375Y, T377I, C378Y, | |
| | F379 | |
| G236S, G106R, G670E | C375Y, C378Y, C679Y, other C | destabilized protein |
| | to Y, P to S/L, | folding |
| | G to R, E to K, etc. identifiable | |
| | by screening | |
| A53V, L15insL, | E49K, S47F, P12S/L, P14S/L, | modify ER entry leader |
| R46L | G24D, G27D, R29C | peptide |
| cytosine (C) 161 to thymine | guanine (G) to adenosine (A) in | modification or destabilization |
| (T) | intron-exon junctions, modify | of mRNA |
| | ATG | |
| | (Methionine) start codon to ATA | |
| | (Isoleucine) | |
| Y142X, C679X, | Q to Amber, R to Opal, W to | premature stop codons |
| A68frame shift, R97del (X is | Opal/Amber | |
| a stop codon) | (preferably in tandem, or in | |
| | flexible loops) | |
| R46L, A53V | N533A, S688F | post-translational |
| | | modification sites |

### Codon Change

[0129] Using the nucleobase editors described herein, several amino acid codons may be converted to a different codon via deamination of a target base within the codon. For example, in some embodiments, a cytosine (C) base is converted to a thymine (T) base via deamination by a nucleobase editor comprising a cytosine deaminase domain (e.g., APOBEC1 or AID). It is worth noting that during a C to T change via deamination (e.g., by a cytosine deaminase such as APOBEC1 or AID), the cytosine is first converted to a uridine (U), leading to a G:U mismatch. The G:U mismatch is then converted by DNA repair and replication pathways to T:A pair, thus introducing the thymine at the position of the original cytosine. As it is familiar to one skilled in the art, conversion of a base in an amino acid codon may lead to a change of the amino acid the codon encodes. Cytosine deaminases are capable of converting a cytosine (C) base to a thymine (T) base via deamination. Thus, it is envisioned that, for amino acid codons containing a C base, the C base may be directly converted to T. For example, leucine codon (CTC) may be changed to a TTC (phenylalanine) codon via the deamination of the first C on the coding strand. For amino acid codons that contain a guanine (G) base, a C base is present on the complementary strand; and the G base may be converted to an adenosine (A) via the deamination of the C on the complementary strand. For example, an ATG (Met/M) codon may be converted to a ATA (Ile/I) codon via the deamination of the third C on the complementary strand. In some embodiments, two C to T changes are required to convert a codon to a different codon. Non-limiting examples of possible mutations that may be made in the PCSK9-encoding polynucleotide by the nucleobase editors of the present disclosure are summarized in Table 2.

TABLE 2
Exemplary Codon Changes in PCSK9 Gene via Base Editing

| Target codon | Base-editing reaction (s) | Edited codon |
|---|---|---|
| CTT (Leu/L) | 1st base C to T on coding strand | TTT (Phe/F) |
| CTC (Leu/L) | 1st base C to T on coding strand | TTC (Phe/F) |
| ATG (Met/M) | 3rd base C to T on complementary | ATA (Ile/I) |
| | strand | |
| GTT (Val/V) | 1st base C to T on complementary stand | ATT (Ile/I) |
| GTA (Val/V) | 1st base C to T on complementary stand | ATA (Ile/I) |
| GTC (Val/V) | 1st base C to T on complementary | ATC (Ile/I) |
| | strand | |
| GTG (Val/V) | 1st base C to T on complementary | ATG (Met/M) |
| | strand | |
| TCT (Ser/S) | 2nd base C to T on coding strand | TTT (Phe/F) |
| TCC (Ser/S) | 2nd base C to T on coding strand | TTC (Phe/F) |
| TCA (Ser/S) | 2nd base C to T on coding strand | TTA (Leu/L) |
| TCG (Ser/S) | 2nd base C to T on coding strand | TTG (Leu/L) |
| AGT (Ser/S) | 2nd base C to T on complementary | AAT (Asp/N) |
| | strand | |
| AGC (Ser/S) | 2nd base C to T on complementary | AAC (Aps/N) |
| | strand | |
| CCT (Pro/P) | 1st base C to T on coding strand | TCT (Ser/S) |
| CCC (Pro/P) | 1st base C to T on coding strand | TCC (Ser/S) |
| CCA (Pro/P) | 1st base C to T on coding strand | TCA (Ser/S) |
| CCG (Pro/P) | 1st base C to T on coding strand | TCG (Ser/S) |
| CCT (Pro/P) | 2nd base C to T on coding strand | CTT (Leu/L) |
| CCC (Pro/P) | 2nd base C to T on coding strand | CTC (Leu/L) |
| CCA (Pro/P) | 2nd base C to T on coding strand | CTA (Leu/L) |
| CCG (Pro/P) | 2nd base C to T on coding strand | CTG (Leu/L) |
| ACT (Thr/T) | 2nd base C to T on coding strand | ATT (Leu/L) |
| ACC (Thr/T) | 2nd base C to T on coding strand | ATC (Leu/L) |
| ACA (Thr/T) | 2nd base C to T on coding strand | ATA (Leu/L) |
| ACG (Thr/T) | 2nd base C to T on coding strand | ATG (Met/M) |
| GCT (Ala/A) | 2nd base C to T on coding strand | GTT (Val/V) |
| GCC (Ala/A) | 2nd base C to T on coding strand | GTC (Val/V) |
| GCA (Ala/A) | 2nd base C to T on coding strand | GTA (Val/V) |
| GCG (Ala/A) | 2nd base C to T on coding strand | GTG (Val/V) |
| GCT (Ala/A) | 1st base C to T on complementary stand | ACT (Thr/T) |
| GCC (Ala/A) | 1st base C to T on complementary stand | ACC (Thr/T) |
| GCA (Ala/A) | 1st base C to T on complementary stand | ACA (Thr/T) |
| GCG (Ala/A) | 1st base C to T on complementary stand | ACG (Thr/T) |
| CAT (His/H) | 1st base C to T on complementary stand | TAT (Tyr/Y) |
| CAC (His/H) | 1st base C to T on complementary stand | TAC (Tyr/Y) |
| GAT (Asp/D) | 1st base C to T on complementary stand | AAT (Asp/N) |
| GAC (Asp/D) | 1st base C to T on complementary stand | AAC (Asp/N) |
| GAA (Glu/E) | 1st base C to T on complementary stand | AAA (Lys/K) |
| GAG (Glu/E) | 1st base C to T on complementary stand | AAG (Lys/K) |
| TGT (Cys/C) | 2nd base C to T on complementary | TAT (Tyr/Y) |
| | stand | |
| TGC (Cys/C) | 2nd base C to T on complementary | TAC (Tyr/Y) |
| | stand | |
| CGT (Arg/R) | 1st base C to T on coding strand | TGT (Cys/C) |
| CGC (Arg/R) | 1st base C to T on coding strand | TGC (Cys/C) |
| AGA (Arg/R) | 2nd base C to T on complementary | AAA (Lys/K) |
| | stand | |
| AGG (Arg/R) | 2nd base C to T on complementary | AAG (Lys/K) |
| | stand | |
| CGG (Arg/R) | 2nd base C to T on complementary | CAG (Gln/Q) |
| | stand | |
| CGG (Arg/R) | 1st base C to T on coding strand | TGG (Trp/W) |
| GGT (Gly/G) | 2nd base C to T on complementary | GAT (Asp/D) |
| | stand | |
| GGC (Gly/G) | 2nd base C to T on complementary | GAC (Asp/D) |
| | stand | |
| GGA (Gly/G) | 2nd base C to T on complementary | GAA (Glu/E) |
| | stand | |
| GGG (Gly/G) | 2nd base C to T on complementary | GAG (Glu/E) |
| | stand | |
| GGT (Gly/G) | 1st base C to T on complementary stand | AGT (Ser/S) |
| GGC (Gly/G) | 1st base C to T on complementary stand | AGC (Ser/S) |
| GGA (Gly/G) | 1st base C to T on complementary stand | AGA (Arg/R) |
| GGG (Gly/G) | 1st base C to T on complementary stand | AGG (Arg/R) |

[0130] In some embodiments, to bind to its target sequence and edit the desired base, the nucleobase editors depend on its guide nucleotide sequence (e.g., a guide RNA In some embodiments, the guide nucleotide sequence is a gRNA sequence. An gRNA typically comprises a tracrRNA framework allowing for Cas9 binding, and a guide sequence, which confers sequence specificity to fusion proteins disclosed herein. In some embodiments, the guide RNA comprises a structure 5′-[guide sequence]-guuuuagagcuagaaauagcaaguuaaaauaaaggcuaguccguuaucaacuugaaaaaguggcaccgagucggugcuuuuu-3′ (SEQ ID NO: 1997), wherein the guide sequence comprises a sequence that is complementary to the target sequence. The guide sequence is typically about 20 nucleotides long. For example, the guide sequence may be 15-25 nucleotides long. In some embodiments, the guide sequence is 15, 16, 17, 18, 19, 20, 21, 22, 23, 24, or 25 nucleotides long. Such suitable guide RNA sequences typically comprise guide sequences that are complementary to a nucleic sequence within 50 nucleotides upstream or downstream of the target nucleotide to be edited.

[0131] Guide sequences that may be used to target the nucleobase editor to its target sequence to induce specific mutations are provided in Table 3. It is to be understood that the mutations and guide sequences presented herein are for illustration purpose only and are not meant to be limiting.

TABLE 3
Exemplary PCSK9 Loss-of-Function Mutations via Codon Change

| | | Location | | | | | |
|---|---|---|---|---|---|---|---|
| Residue | Codon | of | | | gRNA size | | SEQ ID |
| Change | Change | mutation | guide sequence | (PAM) | (C edited) | BE type^{a} | NOs |
| R46C | CGT to | Pro- | GCCUUGCGUUCCGAGGAGGA | (CGG) | 20 (C7) | SpBE3 | 336-342 |
| | TGT | domain | GUGCUAGCCUUGCGUUCCGA | (GGAG) | 20 (C13) | EQR-SpBE3 | |
| | | | UGCUAGCCUUGCGUUCCGAG | (GAG) | 20 (C12) | SpBE3 | |
| | | | GCUAGCCUUGCGUUCCGAGG | (AGG) | 20 (C11) | SpBE3 | |
| | | | CUAGCCUUGCGUUCCGAGGA | (GGAC) | 20 (C10) | VQR-SpBE3 | |
| | | | GCCUUGCGUUCCGAGGAGGA | (CGG) | 20 (C7) | SpBE3 | |
| | | | GCGUUCCGAGGAGGACGGCC | (TGG) | 20 (C2) | SpBE3 | |
| G106R | GGA to | Pro- | GUAUCCCCGGCGGGCAGCCU | (GGG) | 20 (C6) | SpBE3 | 343, |
| | AGA | domain | GGUAUCCCCGGCGGGCAGCC | (TGG) | 20 (C7) | SpBE3 | 344 |
| | | loop, | | | | | |
| | | affects | | | | | |
| | | folding | | | | | |
| L253F | CTC to | Catalytic | CCUGCGCGUGCUCAACUGCC | (AAG) | 20 (C11) | SpBE3 | 345-352 |
| | TTC | domain, | CUGCGCGUGCUCAACUGCCA | (AGG) | 20 (C10) | SpBE3 | |
| | | affects | UGCGCGUGCUCAACUGCCAA | (GGG) | 20 (C9) | SpBE3 | |
| | | self- | GCGCGUGCUCAACUGCCAAG | (GGAA) | 20 (C8) | EQR-SpBE3 | |
| | | cleavage | GCGUGCUCAACUGCCAAGGG | (AAG) | 20 (C6) | SpBE3 | |
| | | | CGUGCUCAACUGCCAAGGGA | (AGG) | 20 (C5) | SpBE3 | |
| | | | GUGCUCAACUGCCAAGGGAA | (GGG) | 20 (C3) | SpBE3 | |
| | | | CUCAACUGCCAAGGGAAGGG | (CACGGT) | 20 (C1) | KKH-SaBE3 | |
| A443T | GCC to | Catalytic | GCGGCCACCAGGUUGGGGGU | (CAG) | 20 (C2) | SpBE3 | 353-363 |
| | ACC | domain, | CAGGGCGGCCACCAGGUUGG | (GGG) | 20 (C6) | SpBE3 | |
| | | enhanced | GCAGGGCGGCCACCAGGUUG | (GGG) | 20 (C7) | SpBE3 | |
| | | furin | GGCAGGGCGGCCACCAGGUU | (GGG) | 20 (C8) | SpBE3 | |
| | | cleavage | GGGCAGGGCGGCCACCAGGU | (TGG) | 20 (C9) | SpBE3 | |
| | | | UGGGGGGCAGGGCGGCCACC | (AGG) | 20 (C12) | SpBE3 | |
| | | | CUGGGGGGCAGGGCGGCCAC | (CAG) | 20 (C13) | SpBE3 | |
| | | | GGGCGGCCACCAGGUUGGGG | (GTCAGT) | 20 (C4) | KKH-SaBE3 | |
| | | | GGCAGGGCGGCCACCAGGUU | (GGGGGT) | 20 (C7) | SaBE3 | |
| | | | GGCAGGGCGGCCACCAGGUU | (GGGGG) | 20 (C8) | St3BE3 | |
| | | | GGGCAGGGCGGCCACCAGGU | (TGGGG) | 20 (C9) | St3BE3 | |
| R93C | CGC to | Pro- | AGCGCACUGCCCGCCGCCUG | (CAG) | 20 (C3) | SpBE3 | 364, |
| | TGC | domain | GCGCACUGCCCGCCGCCUGC | (AGG) | 20 (C2) | SpBE3 | 365 |
| A53V | GCC to | Pro- | GACGGCCUGGCCGAAGCACC | (CGAG) | 20 (C11) | EQR-SpBE3 | 366-369 |
| | GTC | domain | ACGGCCUGGCCGAAGCACCC | (GAG) | 20 (C10) | SpBE3 | |
| | | | CUGGCCGAAGCACCCGAGCA | (CGG) | 20 (C5) | SpBE3 | |
| | | | UGGCCGAAGCACCCGAGCAC | (GGAA) | 20 (C4) | EQR-SpBE3 | |
| A68T | GCC to | Pro- | GCGCAGCGGUGGAAGGUGGC | (TGTG) | 20 (C2) | VQR-SpBE3 | 370-379 |
| | ACC | domain | CUUGGCGCAGCGGUGGAAGG | (TGG) | 20 (C6) | SpBE3 | |
| | | | ACCUUGGCGCAGCGGUGGAA | (GGTG) | 20 (C8) | VQR-SpBE3 | |
| | | | CACCUUGGCGCAGCGGUGGA | (AGG) | 20 (C9) | SpBE3 | |
| | | | GCACCUUGGCGCAGCGGUGG | (AAG) | 20 (C10) | SpBE3 | |
| | | | CCGCACCUUGGCGCAGCGGU | (GGAA) | 20 (C12) | VQR-SpBE3 | |
| | | | CCCGCACCUUGGCGCAGCGG | (TGG) | 20 (C13) | SpBE3 | |
| | | | GCGCAGCGGUGGAAGGUGGC | (TGTGGT) | 20 (C2) | KKH-SaBE3 | |
| | | | CGCACCUUGGCGCAGCGGUG | (GAAGGT) | 20 (C11) | KKH-SaBE3 | |
| | | | CACCUUGGCGCAGCGGUGGA | (AGGTG) | 20 (C9) | St3BE3 | |
| E57K | GAG to | Pro- | CGUGCUCGGGUGCUUCGGCC | (AGG) | 20 (C7) | SpBE3 | 380-382 |
| | AAG | domain | CCGUGCUCGGGUGCUUCGGC | (CAG) | 20 (C8) | SpBE3 | |
| | | | GGUUCCGUGCUCGGGUGCUU | (CGG) | 20 (C12) | SpBE3 | |
| G263S | GGC to | Catalytic | CGCUAACCGUGCCCUUCCCU | (TGG) | 20 (C1) | SpBE3 | 383-385 |
| | AGC | domain | CCUAUGAGGGUGCCGCUAAC | (CGTG) | 20 (C14) | VQR-SpBE3 | |
| | | | CGCUAACCGUGCCCUUCCCUU | (GGCAGT) | 21 (C−1) | KKH-SaBE3 | |
| H391Y | CAC to | Catalytic | CUGCUGCCCACGUGGCUGGU | (AAG) | 20 (C9) | SpBE3 | 386, |
| | TAC | domain | GGCUGCUGCCCACGUGGCUG | (GTAAGT) | 20 (C11) | KKH-SaBE3 | 387 |
| G452D | GGT to | V-domain | CAACCUGCAAAAAGGGCCUG | (GGAT) | 20 (C4) | VQR-SpBE3 | 388-394 |
| | GAT | start | CCAACCUGCAAAAAGGGCCU | (GGG) | 20 (C5) | SpBE3 | |
| | | residue | GCCAACCUGCAAAAAGGGCC | (TGG) | 20 (C6) | SpBE3 | |
| | | | CAGCUGCCAACCUGCAAAAA | (GGG) | 20 (C11) | SpBE3 | |
| | | | ACAGCUGCCAACCUGCAAAA | (AGG) | 20 (C12) | SpBE3 | |
| | | | AACAGCUGCCAACCUGCAAA | (AAG) | 20 (C13) | SpBE3 | |
| | | | GCCAACCUGCAAAAAGGGCC | (TGGGAT) | 20 (C6) | SaBE3 | |
| A522T | GCT to | C- | CGUAGACACCCUCACCCCCAA | (AAG) | 21 (C−1) | SpBE3 | 395 |
| | ACT | terminal | | | | | |
| | | domain | | | | | |
| P616L | CCC to | C- | AGCAUGGAAUCCCGGCCCCU | (CAG) | 20 (C11/12) | SpBE3 | 396-406 |
| | CTC | terminal | GCAUGGAAUCCCGGCCCCUC | (AGG) | 20 (C10/11) | SpBE3 | |
| | | domain | CAUGGAAUCCCGGCCCCUCA | (GGAG) | 20 (C9/10) | EQR-SpBE3 | |
| | | | AUGGAAUCCCGGCCCCUCAG | (GAG) | 20 (C8/9) | SpBE3 | |
| | | | GAAUCCCGGCCCCUCAGGAG | (CAG) | 20 (C5/6) | SpBE3 | |
| | | | AAUCCCGGCCCCUCAGGAGC | (AGG) | 20 (C4/5) | SpBE3 | |
| | | | AUCCCGGCCCCUCAGGAGCA | (GGTG) | 20 (C3/4) | VQR-SpBE3 | |
| | | | CCCGGCCCCUCAGGAGCAGG | (TGAA) | 20 (C1/2) | EQR-SpBE3 | |
| | | | GGAAUCCCGGCCCCUCAGGA | (GCAGGT) | 20 (C6/7) | KKH-SaBE3 | |
| | | | GCAUGGAAUCCCGGCCCCUC | (AGGAG) | 20 (C11/12) | St3BE3 | |
| | | | AAUCCCGGCCCCUCAGGAGC | (AGGTG) | 20 (C4/5) | St3BE3 | |
| T771I | ACC to | Pro- | GCAGCACCUGCUUUGUGUCA | (CAG) | 20 (C7) | SpBE3 | 407-413 |
| | ATC | domain | CAGCACCUGCUUUGUGUCAC | (AGAG) | 20 (C6) | EQR-SpBE3 | |
| | | | AGCACCUGCUUUGUGUCACA | (GAG) | 20 (C5) | SpBE3 | |
| | | | GCACCUGCUUUGUGUCACAG | (AGTG) | 20 (C4) | VQR-SpBE3 | |
| | | | ACCUGCUUUGUGUCACAGAG | (TGG) | 20 (C2) | SpBE3 | |
| | | | CCUGCUUUGUGUCACAGAGU | (GGG) | 20 (C1) | SpBE3 | |
| | | | GCAGCACCUGCUUUGUGUCA | (CAGAGT) | 20 (C7) | SaBE3 | |
| M1I | ATG to | Translation | GCCCAUGAGGGCCAGGGGAG | (AGG) | 20 (C4) | SpBE3 | 414-426 |
| | ATA | start | UGCCCAUGAGGGCCAGGGGA | (GAG) | 20 (C5) | SpBE3 | |
| | | site, no | GUGCCCAUGAGGGCCAGGGG | (AGAG) | 20 (C6) | EQR-SpBE3 | |
| | | alternative | GGUGCCCAUGAGGGCCAGGG | (GAG) | 20 (C7) | SpBE3 | |
| | | nearby | CGGUGCCCAUGAGGGCCAGG | (GGAG) | 20 (C8) | EQR-SpBE3 | |
| | | | ACGGUGCCCAUGAGGGCCAG | (GGG) | 20 (C9) | SpBE3 | |
| | | | GACGGUGCCCAUGAGGGCCA | (GGG) | 20 (C10) | SpBE3 | |
| | | | UGACGGUGCCCAUGAGGGCC | (AGGG) | 20 (C11) | SpBE3 | |
| | | | UGACGGUGCCCAUGAGGGCC | (AGG) | 20 (C11) | SpBE3 | |
| | | | CUGACGGUGCCCAUGAGGGC | (CAG) | 20 (C12) | SpBE3 | |
| | | | GUGCCCAUGAGGGCCAGGGG | (AGAGGT) | 20 (C6) | KKH-SaBE3 | |
| | | | ACGGUGCCCAUGAGGGCCAG | (GGGAG) | 20 (C9) | St3BE3 | |
| | | | UGACGGUGCCCAUGAGGGCC | (AGGGG) | 20 (C10) | St3BE3 | |
| G24D | GGT to | Leader | CCCAGGAGCAGCAGCAGCAG | (CAG) | 20 (C1) | SpBE3 | 427-432 |
| | GAT | peptide | GGACCCAGGAGCAGCAGCAG | (CAG) | 20 (C4) | SpBE3 | |
| | | | GCGGGACCCAGGAGCAGCAG | (CAG) | 20 (C7) | SpBE3 | |
| | | | CCCGCGGGACCCAGGAGCAG | (CAG) | 20 (C1/10) | SpBE3 | |
| | | | GCGCCCGCGGGACCCAGGAG | (CAG) | 20 (C13) | SpBE3 | |
| | | | GGCGCAGGCCUCCCAGGAGC | (TCCAGT) | 20 (C12) | KKH-SaBE3 | |
| G27D | GGC to | Leader | GCGCCCGCGGGACCCAGGAG | (CAG) | 20 (C4) | SpBE3 | 433-438 |
| | GAC | peptide | CGGGCGCCCGCGGGACCCAG | (GAG) | 20 (C7) | SpBE3 | |
| | | | ACGGGCGCCCGCGGGACCCA | (GGAG) | 20 (C8) | EQR-SpBE3 | |
| | | | CACGGGCGCCCGCGGGACCC | (AGG) | 20 (C9) | SpBE3 | |
| | | | GCACGGGCGCCCGCGGGACC | (GAG) | 20 (C10) | SpBE3 | |
| | | | CACGGGCGCCCGCGGGACCC | (AGGAG) | 20 (C9) | St3BE3 | |
| R29C | CGT to | Leader | CCCGCGGGCGCCCGUGCGCA | (GGAG) | 20 (C13) | EQR-SpBE3 | 439-449 |
| | TGT | peptide | CCGCGGGCGCCCGUGCGCAG | (GAG) | 20 (C12) | SpBE3 | |
| | | | CGCGGGCGCCCGUGCGCAGG | (AGG) | 20 (C11) | SpBE3 | |
| | | | GCGGGCGCCCGUGCGCAGGA | (GGAC) | 20 (C10) | VQR-SpBE3 | |
| | | | GGCGCCCGUGCGCAGGAGGA | (CGAG) | 20 (C7) | EQR-SpBE3 | |
| | | | GCGCCCGUGCGCAGGAGGAC | (GAG) | 20 (C6) | SpBE3 | |
| | | | CGCCCGUGCGCAGGAGGACG | (AGG) | 20 (C5) | SpBE3 | |
| | | | GCCCGUGCGCAGGAGGACGA | (GGAC) | 20 (C4) | VQR-SpBE3 | |
| | | | CGUGCGCAGGAGGACGAGGA | (CGG) | 20 (C1) | SpBE3 | |
| | | | CGUGCGCAGGAGGACGAGGAC | (GGCG) | 21 (C−1) | VRER-SpBE3 | |
| | | | CGUGCGCAGGAGGACGAGGA | (CGGCG) | 20 (C1) | St3BE3 | |
| S47F | TCC to | Leader | GCCUUGCGUUCCGAGGAGGA | (CGG) | 20 (C6) | SpBE3 | 450-425 |
| | TTC | peptide | GCGUUCCGAGGAGGACGGCC | (TGG) | 20 (C5) | SpBE3 | |
| | | | UCCGAGGAGGACGGCCUGGC | (CGAA) | 20 (C2) | VQR-SpBE3 | |
| P12S | CCA to | Leader | CCACCAGGACCGCCUGGAGC | (TGAC) | 20 (C1) | VQR-SpBE3 | 453-458 |
| | UCA | peptide | GCGGCCACCAGGACCGCCUG | (GAG) | 20 (C5) | SpBE3 | |
| | | | AGCGGCCACCAGGACCGCCU | (GGAG) | 20 (C6) | EQR-SpBE3 | |
| | | | CAGCGGCCACCAGGACCGCC | (TGG) | 20 (C8) | SpBE3 | |
| | | | CACCAGGACCGCCUGGAGCU | (GACGGT) | 20 (C−1) | KKH-SaBE3 | |
| | | | CAGCGGCCACCAGGACCGCC | (TGGAG) | 20 (C8/1) | St3BE3 | |
| P14S | CCA to | Leader | CAGCGGCCACCAGGACCGCC | (TGG) | 20 (C1) | SpBE3 | 459-462 |
| | UCA | peptide | AGCAGUGGCAGCGGCCACCA | (GGAC) | 20 (C9) | VQR-SpBE3 | |
| | | | CAGCAGUGGCAGCGGCCACC | (AGG) | 20 (C10) | SpBE3 | |
| | | | GCAGCAGUGGCAGCGGCCAC | (GAG) | 20 (C11) | SpBE3 | |
| R46H | CGT to | similar to | UCGGAACGCAAGGCUAGCAC | (CAG) | 20 (C7) | SpBE3 | 463, |
| | CAT | R46L | GGCAAGGCUAGCACCAGCUCCU | (CGTAGT) | 22 (C−2) | KKH-SaBE3 | 464 |
| E49K | GAG to | Affects | UCCUCCUCGGAACGCAAGGC | (TAG) | 20 (C5) | SpBE3 | 465-467 |
| | AAG | leader | GCCGUCCUCCUCGGAACGCA | (AGG) | 20 (C9) | SpBE3 | |
| | | peptide | GGCCGUCCUCCUCGGAACGC | (AAG) | 20 (C10) | SpBE3 | |
| | | cleavage | | | | | |
| R237Q | CGG to | LDLR | GUGGUCAGCGGCCGGGAUGC | (CGG) | 20 (C13) | SpBE3 | 468-478 |
| | CAG | binding | UGGUCAGCGGCCGGGAUGCC | (GGCG) | 20 (C12) | VRER-SpBE3 | |
| | | | GUCAGCGGCCGGGAUGCCGG | (CGTG) | 20 (C10) | VQR-SpBE3 | |
| | | | CAGCGGCCGGGAUGCCGGCG | (TGG) | 20 (C8) | SpBE3 | |
| | | | GCCGGGAUGCCGGCGUGGCC | (AAG) | 20 (C3) | SpBE3 | |
| | | | CCGGGAUGCCGGCGUGGCCA | (AGG) | 20 (C2) | SpBE3 | |
| | | | CGGGAUGCCGGCGUGGCCAA | (GGG) | 20 (C1) | SpBE3 | |
| | | | CGGGAUGCCGGCGUGGCCAAG | (GGTG) | 21 (C−1) | VQR-SpBE3 | |
| | | | GCCGGGAUGCCGGCGUGGCC | (AAGGGT) | 20 (C3) | SaBE3 | |
| | | | GUGGUCAGCGGCCGGGAUGC | (CGGCG) | 20 (C13) | St3BE3 | |
| | | | CGGGAUGCCGGCGUGGCCAA | (GGGTG) | 20 (C1) | St3BE3 | |
| S153N | AGC to | LDLR | CUUUGCCCAGAGCAUCCCGU | (GGAA) | 20 (C13) | VQR-SpBE3 | 479-486 |
| | AAC | binding, | CCAGAGCAUCCCGUGGAACC | (TGG) | 20 (C7) | SpBE3 | |
| | | autocatalytic | CAGAGCAUCCCGUGGAACCU | (GGAG) | 20 (C6) | EQR-SpBE3 | |
| | | processing | AGAGCAUCCCGUGGAACCUG | (GAG) | 20 (C5) | SpBE3 | |
| | | | GAGCAUCCCGUGGAACCUGG | (AGCG) | 20 (C4) | VRER-SpBE3 | |
| | | | GCAUCCCGUGGAACCUGGAG | (CGG) | 20 (C2) | SpBE3 | |
| | | | AGCAUCCCGUGGAACCUGGA | (GCGGAT) | 20 (C3) | SaBE3 | |
| | | | CCAGAGCAUCCCGUGGAACC | (TGGAG) | 20 (C7) | St3BE3 | |
| R194Q | CGG to | LDLR | CGGUGGUCACUCUGUAUGCU | (GGTG) | 20 (C1) | VQR-SpBE3 | 487-490 |
| | CAG | binding | CCGGUGGUCACUCUGUAUGC | (TGG) | 20 (C2) | SpBE3 | |
| | | | UCCCGGUGGUCACUCUGUAU | (GCTGGT) | 20 (C4) | KKH-SaBE3 | |
| | | | CCGGUGGUCACUCUGUAUGC | (TGGTG) | 20 (C2) | St3BE3 | |
| R194W | CGG to | LDLR | CAGAGUGACCACCGGGAAAU | (CGAG) | 20 (C13) | EQR-SpBE3 | 491-499 |
| | TGG | binding | AGAGUGACCACCGGGAAAUC | (GAG) | 20 (C12) | SpBE3 | |
| | | | GAGUGACCACCGGGAAAUCG | (AGG) | 20 (C11) | SpBE3 | |
| | | | AGUGACCACCGGGAAAUCGA | (GGG) | 20 (C10) | SpBE3 | |
| | | | GACCACCGGGAAAUCGAGGG | (CAG) | 20 (C7) | SpBE3 | |
| | | | ACCACCGGGAAAUCGAGGGC | (AGG) | 20 (C6) | SpBE3 | |
| | | | CCACCGGGAAAUCGAGGGCA | (GGG) | 20 (C5) | SpBE3 | |
| | | | GACCACCGGGAAAUCGAGGG | (CAGGGT) | 20 (C7) | SaBE3 | |
| | | | CGGGAAAUCGAGGGCAGGGU | (CATGGT) | 20 (C1) | KKH-SaBE3 | |
| A220V | GCC to | Furing | UCGUCGAGCAGGCCAGCAAG | (TGTG) | 20 (C13) | VQR-SpBE3 | 500-504 |
| | GTC | cleavage | GUCGAGCAGGCCAGCAAGUG | (TGAC) | 20 (C11) | VQR-SpBE3 | |
| | | region | GAGCAGGCCAGCAAGUGUGA | (CAG) | 20 (C8) | SpBE3 | |
| | | | GCCAGCAAGUGUGACAGUCA | (TGG) | 20 (C2) | SpBE3 | |
| | | | UCGAGCAGGCCAGCAAGUGU | (GACAGT) | 20 (C10) | KKH-SaBE3 | |
| A220T | GCC to | Furing | GGCCUGCUCGACGAACACAA | (GGAC) | 20 (C3) | VQR-SpBE3 | 505-508 |
| | ACC | cleavage | UGGCCUGCUCGACGAACACA | (AGG) | 20 (C4) | SpBE3 | |
| | | region | CUGGCCUGCUCGACGAACAC | (AAG) | 20 (C5) | SpBE3 | |
| | | | ACACUUGCUGGCCUGCUCGA | (CGAA) | 20 (C12) | VQR-SpBE3 | |
| A290V | GCG to | S1 pocket | CUGCCCCUGGCGGGUGGGUA | (CAG) | 20 (C11) | SpBE3 | 509, |
| | GTG | | CCCUGGCGGGUGGGUACAGC | (CGCG) | 20 (C7) | VRER-SpBE3 | 510 |
| A290T | GCC to | S1 pocket | CCAGGGGCAGCAGCACCACC | (AGTG) | 20 (C1) | VQR-SpBE3 | 511-514 |
| | ACC | | GCCAGGGGCAGCAGCACCAC | (GAG) | 20 (C2) | SpBE3 | |
| | | | UACCCACCCGCCAGGGGCAG | (CAG) | 20 (C11) | SpBE3 | |
| | | | CCGCCAGGGGCAGCAGCACC | (ACCAGT) | 20 (C4) | KKH-SaBE3 | |
| D374N | GAC to | LDLR | GCAGUCGCUGGAGGCACCAA | (TGAT) | 20 (C6) | VQR-SpBE3 | 515-517 |
| | AAC | binding | CUGCAGUCGCUGGAGGCACC | (AATGAT) | 20 (C7) | KKH-SaBE3 | |
| | | | GUGCUGCAGUCGCUGGAGGC | (ACCAAT) | 20 (C10) | KKH-SaBE3 | |
| T377I | ACC to | LDLR | GCAGCACCUGCUUUGUGUCA | (CAG) | 20 (C7) | SpBE3 | 518-525 |
| | ATC | binding | CAGCACCUGCUUUGUGUCAC | (AGAG) | 20 (C6) | EQR-SpBE3 | |
| | | | AGCACCUGCUUUGUGUCACA | (GAG) | 20 (C5) | SpBE3 | |
| | | | GCACCUGCUUUGUGUCACAG | (AGTG) | 20 (C4) | VQR-SpBE3 | |
| | | | ACCUGCUUUGUGUCACAGAG | (TGG) | 20 (C2) | SpBE3 | |
| | | | CCUGCUUUGUGUCACAGAGU | (GGG) | 20 (C1) | SpBE3 | |
| | | | CCUGCUUUGUGUCACAGAGUG | (GGAC) | 21 (C−1) | VQR-SpBE3 | |
| | | | GCAGCACCUGCUUUGUGUCA | (CAGAGT) | 20 (C7) | SaBE3 | |
| C378Y | TGC to | LDLR | GCAGGUGCUGCAGUCGCUGG | (AGG) | 20 (C2) | SpBE3 | 526-531 |
| | TAC | binding | AGCAGGUGCUGCAGUCGCUG | (GAG) | 20 (C3) | SpBE3 | |
| | | | AAGCAGGUGCUGCAGUCGCU | (GGAG) | 20 (C4) | EQR-SpBE3 | |
| | | | AAAGCAGGUGCUGCAGUCGC | (TGG) | 20 (C5) | SpBE3 | |
| | | | GUGACACAAAGCAGGUGCUG | (CAG) | 20 (C12) | SpBE3 | |
| | | | AAAGCAGGUGCUGCAGUCGC | (TGGAG) | 20 (C5) | St3BE3 | |
| S386L | TCA to | Catalytic | ACAUCACAGGCUGCUGCCCA | (CGTG) | 20 (C5) | VQR-SpBE3 | 532-534 |
| | TTA | triad | AUCACAGGCUGCUGCCCACG | (TGG) | 20 (C3) | SpBE3 | |
| | | | CACAGGCUGCUGCCCACGUG | (GCTGGT) | 20 (C1) | KKH-SaBE3 | |
| S688F | TCC to | Phosphorylation | CGCAGGCCUCCCAGGAGCUC | (CAG) | 20 (C10) | SpBE3 | 535-539 |
| | TTC | site | GCAGGCCUCCCAGGAGCUCC | (AGTG) | 20 (C9) | VQR-SpBE3 | |
| | | | AGGCCUCCCAGGAGCUCCAG | (TGAC) | 20 (C7) | VQR-SpBE3 | |
| | | | CCUCCCAGGAGCUCCAGUGA | (CAG) | 20 (C4) | SpBE3 | |
| | | | GGCGCAGGCCUCCCAGGAGC | (TCCAGT) | 20 (C12) | KKH-SaBE3 | |
| D186N | GAC to | Catalytic | CUAGGAGAUACACCUCCACC | (AGG) | 20 (C1) | SpBE3 | 540, |
| | AAC | triad | UCUAGGAGAUACACCUCCAC | (CAG) | 20 (C2) | SpBE3 | 541 |
| H226Y | CAT to | Catalytic | UGACAGUCAUGGCACCCACC | (TGG) | 20 (C8) | SpBE3 | 542-551 |
| | TAT | triad | CAGUCAUGGCACCCACCUGG | (CAG) | 20 (C5) | SpBE3 | |
| | | | AGUCAUGGCACCCACCUGGC | (AGG) | 20 (C4) | SpBE3 | |
| | | | GUCAUGGCACCCACCUGGCA | (GGG) | 20 (C3) | SpBE3 | |
| | | | UCAUGGCACCCACCUGGCAG | (GGG) | 20 (C2) | SpBE3 | |
| | | | CAUGGCACCCACCUGGCAGG | (GGTG) | 20 (C1) | VQR-SpBE3 | |
| | | | AGUCAUGGCACCCACCUGGC | (AGGGGT) | 20 (C4) | SaBE3 | |
| | | | CAUGGCACCCACCUGGCAGG | (GGTGGT) | 20 (C1) | KKH-SaBE3 | |
| | | | AGUCAUGGCACCCACCUGGC | (AGGGG) | 20 (C4) | St3BE3 | |
| | | | UCAUGGCACCCACCUGGCAG | (GGGTG) | 20 (C2) | St3BE3 | |
| H193Y | CAC to | Folds | CAGAGUGACCACCGGGAAAU | (CGAG) | 20 (C10) | EQR-SpBE3 | 552-559 |
| | TAC | region | AGAGUGACCACCGGGAAAUC | (GAG) | 20 (C9) | SpBE3 | |
| | | that binds | GAGUGACCACCGGGAAAUCG | (AGG) | 20 (C8) | SpBE3 | |
| | | LDLR | AGUGACCACCGGGAAAUCGA | (GGG) | 20 (C7) | SpBE3 | |
| | | | GACCACCGGGAAAUCGAGGG | (CAG) | 20 (C4) | SpBE3 | |
| | | | ACCACCGGGAAAUCGAGGGC | (AGG) | 20 (C3) | SpBE3 | |
| | | | CCACCGGGAAAUCGAGGGCA | (GGG) | 20 (C2) | SpBE3 | |
| | | | GACCACCGGGAAAUCGAGGG | (CAGGGT) | 20 (C4) | SaBE3 | |
| S372F | TCC to | LDLR | AUUGGUGCCUCCAGCGACUG | (CAG) | 20 (C11) | SpBE3 | 560 |
| | TTC | binding | | | | | |
| S373N | AGC to | LDLR | GCAGUCGCUGGAGGCACCAA | (TGAT) | 20 (C6) | VQR-SpBE3 | 561-563 |
| | AAC | binding | CUGCAGUCGCUGGAGGCACC | (AATGAT) | 20 (C8/4) | KKH-SaBE3 | |
| | | | GUGCUGCAGUCGCUGGAGGC | (ACCAAT) | 20 (C11/7) | KKH-SaBE3 | |
| C375Y | TGC to | LDLR | GCAGUCGCUGGAGGCACCAA | (TGAT) | 20 (C2) | VQR-SpBE3 | 564-565 |
| | TAC | binding, | GCAGGUGCUGCAGUCGCUGG | (AGG) | 20 (C10) | SpBE3 | |
| | | disrupting | AGCAGGUGCUGCAGUCGCUG | (GAG) | 20 (C11) | SpBE3 | |
| | | formation | AAGCAGGUGCUGCAGUCGCU | (GGAG) | 20 (C12) | EQR-SpBE3 | |
| | | of key | CUGCAGUCGCUGGAGGCACC | (AATGAT) | 20 (C8,4,1) | KKH-SaBE3 | |
| | | disulfide | GUGCUGCAGUCGCUGGAGGC | (ACCAAT) | 20 | KKH-SaBE3 | |
| | | bond | | | (C11,7,4) | | |
| S376N | AGC to | LDLR | GCAGGUGCUGCAGUCGCUGG | (AGG) | 20 (C8) | SpBE3 | 570-576 |
| | AAC | binding | AGCAGGUGCUGCAGUCGCUG | (GAG) | 20 (C9) | SpBE3 | |
| | | | AAGCAGGUGCUGCAGUCGCU | (GGAG) | 20 (C10) | EQR-SpBE3 | |
| | | | AAAGCAGGUGCUGCAGUCGC | (TGG) | 20 (C11) | SpBE3 | |
| | | | CUGCAGUCGCUGGAGGCACC | (AATGAT) | 20 (C1) | KKH-SaBE3 | |
| | | | GUGCUGCAGUCGCUGGAGGC | (ACCAAT) | 20 (C4) | KKH-SaBE3 | |
| | | | AAAGCAGGUGCUGCAGUCGC | (TGGAG) | 20 (C13) | St3BE3 | |
| T384I | ACA to | Near | CAUCACAGGCUGCUGCCCACG | (TGG) | 21 (C−1) | SpBE3 | 577, |
| | ATA | oxyanion | ACAUCACAGGCUGCUGCCCA | (CGTG) | 20 (C2) | VQR-SpBE3 | 578 |
| | | hole | | | | | |

*Single underline indicate C to T change on the coding strand
Double underline indicate C to T change on the complementary strand
Guide sequences (the portion of the guide RNA that targets the nucleobase editor to the target sequence) are provided, which may be used with any tracrRNA framework sequences provided herein to generate the full guide RNA sequence
^{a}BE types: SpBE3 = APOBEC1-SpCas9n-UGI; VQR-SpBE3 = APOBEC1-VQR-SpCas9n-UGI; EQR-SpBE3 = APOBEC1-EQR-SpCas9n-UGI; VRER-SpBE3 = APOBEC1-VRER-SpCas9n-UGI; SaBE3 = APOBEC1-SaCas9n-UGI; KKH-SaBE3 = APOBEC1-KKH-SaCas9n-UGI; St3BE3 = APOBEC1-St3Cas9n-UGI; St1BE3 = APOBEC1-St1Cas9n-UGI.

[0132] In some embodiments, the loss-of-function PCSK9 variant produced using the method described herein comprises a R46C mutation (CGT to TGT), mimicking the natural protective variant R46L. The PCSK9 R46L variant has been characterized to possess cholesterol-lowering effect and to reduce the risk of early-onset myocardial infraction. See, e.g., in Strom et al., Clinica Chimica Acta, Volume 411, Issues 3-4, 2, Pages 229-233, 2010; Saavedra et al., Arterioscler Thromb Vasc Biol., 34(12):2700-5, 2014; Cameron et al., Hum. Mol. Genet., 15 (9): 1551-1558, 2006; and Bonnefond et al., Diabetologia, Volume 58, Issue 9, pp 2051-2055, 2015, each of which is incorporated herein by reference.

[0133] In some embodiments, the loss-of-function PCSK9 variant produced using the method described herein comprises a L253F mutation (CTC to TTC). PCSK9 L253F variant has been shown to reduce plasma LDL-Cholesterol levels. See, e.g., in Kotowski et al., Am J Hum Genet., 78(3): 410-422, 2006; Zhao et al., Am J Hum Genet., 79(3): 514-523, 2006; Huang et al., Circ Cardiovasc Genet., 2(4): 354-361, 2009; and Hampton et al., PNAS, vol 104, No. 37, 14604-14609, 2007, each of which are incorporated herein by reference.

[0134] In some embodiments, the loss-of-function PCSK9 variant produced using the method described herein comprises a A443T mutation (GCC to ACC). PCSK9 A443T mutant has been shown to be associated with reduced plasma LCL-Chlesterol levels. See, e.g., in Mayne et al., Lipids in Health and Disease, 2013-12:70, 2013; Allard et al., Hum Mutat., 26(5):497, 2005; Huang et al., Circ Cardiovasc Genet., 2(4): 354-361, 2009; and Benjannet et al., Journal of Biological Chemistry, Vol. 281, No. 41, 2006, each of which are incorporated herein by reference.

[0135] In some embodiments, the loss-of-function PCSK9 variant produced using the method described herein comprises a R93C mutation (CGC to TGC). PCSK9 R93C variant has been shown to be associated with reduced plasma LCL-Chlesterol levels. See, e.g., in Mayne et al., Lipids in Health and Disease, 2013-12:70, 2013; Miyake et al., Atherosclerosis, 196(1):29-36, 2008; and Tang et al., Nature Communications, 6, Article number: 10206, 2015, each of which are incorporated herein by reference.

[0136] In some embodiments, cellular PCSK9 activity may be reduced by reducing the level of properly folded and active PCSK9 protein. Introducing destabilizing mutations into the wild type PCSK9 protein may cause misfolding or deactivation of the protein. A PCSK9 variant comprising one or more destabilizing mutations described herein may have reduced activity compared to the wild type PCSK9 protein. For example, the activity of a PCSK9 variant comprising one or more destabilizing mutations described herein may be reduced by at least about 20%, at least about 30%, at least about 40%, at least about 50%, at least about 60%, at least about 70%, at least about 80%, at least about 90%, at least about 95%, at least about 99%, or more.

[0137] Further, the present disclosure also contemplates the use of destabilizing mutations to counteract the effect of gain-of-function PCSK9 variant. Gain-of-function PCSK9 variants (e.g., the gain-of-function variants described in FIG. 1A have been described in the art and are found to be associated with hypercholesterolemia (e.g., in Peterson et al., J Lipid Res. 2008 June; 49(6): 1152-1156; Benjannet et al., J Biol Chem. 2012 Sep. 28; 287(40):33745-55; Abifadel et al., Atherosclerosis. 2012 August; 223(2):394-400; and Cameron et al., Hum. Mol. Genet. (1 May 2006) 15(9): 1551-1558, each of which is incorporated herein by reference). Introducing destabilizing mutations into these gain-of-function PCSK9 variants may cause misfolding and deactivation of these gain-of-function variants, thereby counteracting the hyper-activity caused by the gain-of-function mutation. Further, gain-of-function mutations in several other key factors in the LDL-R mediated cholesterol clearance pathway, e.g., LDL-R, APOB, or APOC, have also been described in the art. Thus, making destabilizing mutations in these factors to counteract the deleterious effect of the gain-of-function mutation using the compositions and methods described herein, is also within the scope of the present disclosure.

[0138] As such, the present disclosure further provides mutations that cause misfolding of PCSK9 protein or structurally destabilization of PCSK9 protein. Non-limiting, exemplary destabilizing PCSK9 mutations that may be made using the methods described herein are shown in Table 4.

TABLE 4
Exemplary PCSK9 Variants to Destabilize Protein Folding

| | | | | | | SEG |
|---|---|---|---|---|---|---|
| Residue | | | | gRNA size | | ID |
| change | Codon change | Guide sequence | (PAM) | (C edited) | BE type^{a} | NOs |
| P25S/L | CCC to CTC or | UCCUGGGUCCCGCGGGCGCC | (CGTG) | 20 (C9/10) | VQR-SpBE3 | 579-585 |
| | CCC to TCC | CUGGGUCCCGCGGGCGCCCG | (TGCG) | 20 (C7/8) | VRER-SpBE3 | |
| | | GUCCCGCGGGCGCCCGUGCG | (CAG) | 20 (C3/4) | SpBE3 | |
| | | UCCCGCGGGCGCCCGUGCGC | (AGG) | 20 (C2/3) | SpBE3 | |
| | | CCCGCGGGCGCCCGUGCGCA | (GGAG) | 20 (C1/2) | EQR-SpBE3 | |
| | | CCGCGGGCGCCCGUGCGCAG | (GAG) | 20 (C1/−1) | SpBE3 | |
| | | UCCCGCGGGCGCCCGUGCGC | (AGGAG) | 20 (C2) | St3BE3 | |
| P56S/L | CCC to CTC or | CUGGCCGAAGCACCCGAGCA | (CGG) | 20 (C13) | SpBE3 | 586-888 |
| | CCC to TCC | UGGCCGAAGCACCCGAGCAC | (GGAA) | 20 (C12/13) | VQR-SpBE3 | |
| | | AGCACCCGAGCACGGAACCA | (CAG) | 20 (C5/6) | SpBE3 | |
| C67Y | TGC to TAC | GCAGCGGUGGAAGGUGGCUG | (TGG) | 20 (C2) | SpBE3 | 589-595 |
| | | GCGCAGCGGUGGAAGGUGGC | (TGTG) | 20 (C4) | VQR-SpBE3 | |
| | | CUUGGCGCAGCGGUGGAAGG | (TGG) | 20 (C8) | SpBE3 | |
| | | ACCUUGGCGCAGCGGUGGAA | (GGTG) | 20 (C10) | VQR-SpBE3 | |
| | | CACCUUGGCGCAGCGGUGGA | (AGG) | 20 (C11) | SpBE3 | |
| | | GCGCAGCGGUGGAAGGUGGC | (TGTGGT) | 20 (C4) | KKH-SaBE3 | |
| | | CACCUUGGCGCAGCGGUGGA | (AGGTG) | 20 (C11) | St3BE3 | |
| P71S/L | CCG to TCG or | CAGGAUCCGUGGAGGUUGCC | (TGG) | 20 (C7/8) | SpBE3 | 596 |
| | CCG to CTG | | | | | |
| P75S/L | CCT to TCT | UGGAGGUUGCCUGGCACCUA | (CGTG) | 20 (C10/11) | VQR-SpBE3 | 597-605 |
| | or | GAGGUUGCCUGGCACCUACG | (TGG) | 20 (C8/9) | SpBE3 | |
| | CCT to CTT | AGGUUGCCUGGCACCUACGU | (GGTG) | 20 (C7/8) | VQR-SpBE3 | |
| | | GUUGCCUGGCACCUACGUGG | (TGG) | 20 (C5/6) | SpBE3 | |
| | | UUGCCUGGCACCUACGUGGU | (GGTG) | 20 (C4/5) | VQR-SpBE3 | |
| | | UGGAGGUUGCCUGGCACCUA | (CGTGGT) | 20 (C10/11) | KKH-SaBE3 | |
| | | AGGUUGCCUGGCACCUACGU | (GGTGGT) | 20 (C7/8) | KKH-SaBE3 | |
| | | GAGGUUGCCUGGCACCUACG | (TGGTG) | 20 (C8/9) | St3BE3 | |
| | | GUUGCCUGGCACCUACGUGG | (TGGTG) | 20 (C5/6) | St3BE3 | |
| P120S/L | CCT to TCT | GUCUUCCAUGGCCUUCUUCC | (TGG) | 20 (C12/13) | SpBE3 | 606-612 |
| | or | GGCCUUCUUCCUGGCUUCCU | (GGTG) | 20 (C3/4) | VQR-SpBE3 | |
| | CCT to CTT | UGGCCUUCUUCCUGGCUUCC | (TGG) | 20 (C4/5) | SpBE3 | |
| | | CCUUCUUCCUGGCUUCCUGG | (TGAA) | 20 (C1/2) | VQR-SpBE3 | |
| | | CAUGGCCUUCUUCCUGGCUU | (CCTGGT) | 20 (C7/8) | KKH-SaBE3 | |
| | | CUUCUUCCUGGCUUCCUGGU | (GAAGAT) | 20 (C1/2) | KKH-SaBE3 | |
| | | UGGCCUUCUUCCUGGCUUCC | (TGGTG) | 20 (C4/5) | St3BE3 | |
| P138S/L | CCC to CTC or | GCCUUGAAGUUGCCCCAUGU | (CGAC) | 20 (C13) | VQR-SpBE3 | 613-619 |
| | CCC to TCC | UUGCCCCAUGUCGACUACAU | (CGAG) | 20 (C4/5) | EQR-SpBE3 | |
| | | UGCCCCAUGUCGACUACAUC | (GAG) | 20 (C3/4) | SpBE3 | |
| | | GCCCCAUGUCGACUACAUCG | (AGG) | 20 (C2/3) | SpBE3 | |
| | | GCCCAUGUCGACUAGAUCGA | (GGAG) | 20 (C1/2) | EQR-SpBE3 | |
| | | CCCAUGUCGACUACAUCGAG | (GAG) | 20 (C1/−1) | SpBE3 | |
| | | GCCCCAUGUCGACUACAUCG | (AGGAG) | 20 (C2/3) | St3BE3 | |
| P155S/L | CCG to TCG or | CCAGAGCAUCCCGUGGAACC | (TGG) | 20 (C10/11) | SpBE3 | 620-627 |
| | CCG to CTG | CAGAGCAUCCCGUGGAACCU | (GGAG) | 20 (C9/10) | EQR-SpBE3 | |
| | | AGAGCAUCCCGUGGAACCUG | (GAG) | 20 (C8/9) | SpBE3 | |
| | | GAGCAUCCCGUGGAACCUGG | (AGCG) | 20 (C7/8) | VRER-SpBE3 | |
| | | GCAUCCCGUGGAACCUGGAG | (CGG) | 20 (C5/6) | SpBE3 | |
| | | CAUCCCGUGGAACCUGGAGC | (GGAT) | 20 (C4/5) | VQR-SpBE3 | |
| | | AGCAUCCCGUGGAACCUGGA | (GCGGAT) | 20 (C6/7) | SaBE3 | |
| | | CCAGAGCAUCCCGUGGAACC | (TGGAG) | 20 (C10) | St3BE3 | |
| P163S/L | CCT to TCT | GGAUUACCCCUCCACGGUAC | (CGG) | 20 (C9,10,12,13) | SpBE3 | 628-636 |
| and | or | GAUUACCCCUCCACGGUACC | (GGG) | 20 (C8,9,11,12) | SpBE3 | |
| P164S/L | CCT to CTT | AUUACCCCUCCACGGUACCG | (GGCG) | 20 (C7,8,10,11) | VRER-SpBE3 | |
| | and/or | UACCCCUCCACGGUACCGGG | (CGG) | 20 (C5,6,8,9) | SpBE3 | |
| | CCA to TCA or | ACCCCUCCACGGUACCGGGC | (GGAT) | 20 (C4,5,7,8) | VQR-SpBE3 | |
| | CCA to CTA | CCUCCACGGUACCGGGCGGA | (TGAA) | 20 (C1,2,4,5) | VQR-SpBE3 | |
| | | UUACCCCUCCACGGUACCGG | (GCGGAT) | 20 (C6,7,9,10) | SaBE3 | |
| | | CCCUCCACGGUACCGGGCGG | (ATGAAT) | 20 (C2,3,5,6) | SaBE3 | |
| | | GAUUACCCCUCCACGGUACC | (GGGCG) | 20 (C8,9,11,12) | St3BE3 | |
| P173S/L | | UGAAUACCAGCCGCCCGGUA | (AGAC) | 20 (C11/12) | VQR-SpBE3 | 637, 638 |
| and | | CCCCCCGGUAAGACCCCCAUC | (TGTG) | 21 (C1,−1,3,4) | VQR-SpBE3 | |
| P164S/L | | | | | | |
| G176R/E | GGA to AGA | CUGCCUCCGUCUUUCCAAGG | (CGAC) | 20 (C7/8) | VQR-SpBE3 | 639-642 |
| | or | GGCUGCCUCCGUCUUUCCAA | (GGCG) | 20 (C9/10) | VRER-SpBE3 | |
| | GGA to GAA | AGGCUGCCUCCGUCUUUCCA | (AGG) | 20 (C12/13) | SpBE3 | |
| | | AGGCUGCCUCCGUCUUUCCA | (AGGCG) | 20 (C9/10) | St3BE3 | |
| P209S/L | CCC to CTC or | UUCGAGAAUGUGCCCGAGGA | (GGAC) | 20 (C13/14) | VQR-SpBE3 | 643-646 |
| | CCC to TCC | GAGAAUGUGCCCGAGGAGGA | (CGG) | 20 (C10/11) | SpBE3 | |
| | | AGAAUGUGCCCGAGGAGGAC | (GGG) | 20 (C9/10) | SpBE3 | |
| | | GAAUGUGCCCGAGGAGGACG | (GGAC) | 20 (C8/9) | VQR-SpBE3 | |
| G213R/E | GGG to AGG or | GAAGCGGGUCCCGUCCUCCU | (CGGG) | 20 (C10/11) | VQR-SpBE3 | 647-649 |
| | GGG to GAG | AAGCGGGUCCCGUCCUCCUC | (GGG) | 20 (C9/10) | SpBE3 | |
| | | GAAGCGGGUCCCGUCCUCCU | (CGG) | 20 (C10/11) | SpBE3 | |
| C223Y | TGT to TAT | ACACUUGCUGGCCUGCUCGA | (CGAA) | 20 (C2) | VQR-SpBE3 | 650, 651 |
| | | GUCACACUUGCUGGCCUGCU | (CGAC) | 20 (C5) | VQR-SpBE3 | |
| G232R/E | GGG to AGG or | CCCCUGCCAGGUGGGUGCCA | (TGAC) | 20 (C2/3) | VQR-SpBE3 | 652-659 |
| | GGG to GAG | CUGACCACCCCUGCCAGGUG | (GGTG) | 20 (C8/9) | VQR-SpBE3 | |
| | | CGCUGACCACCCCUGCCAGG | (TGGG) | 20 (C10/11) | VQR-SpBE3 | |
| | | GCUGACCACCCCUGCCAGGU | (GGG) | 20 (C9/10) | VQR-SpBE3 | |
| | | CGCUGACCACCCCUGCCAGG | (TGG) | 20 (C10/11) | SpBE3 | |
| | | GCCGCUGACCACCCCUGCCA | (GGTG) | 20 (C12/13) | VQR-SpBE3 | |
| | | CCGCUGACCACCCCUGCCAG | (GTGGGT) | 20 (C11/12) | SaBE3 | |
| | | GCUGACCACCCCUGCCAGGU | (GGGTG) | 20 (C9/10) | St3BE3 | |
| C255Y | TGC to TAC | GCAGUUGAGCACGCGCAGGC | (TGCG) | 20 (C2) | VRER-SpBE3 | 660-663 |
| | | CUUGGCAGUUGAGCACGCGC | (AGG) | 20 (C6) | SpBE3 | |
| | | CCUUGGCAGUUGAGCACGCG | (CAG) | 20 (C7) | SpBE3 | |
| | | CUUCCCUUGGCAGUUGAGCA | (CGCG) | 20 (C11) | VRER-SpBE3 | |
| G257R | GGG to AGG | CCUUGGCAGUUGAGCACGCG | (GAG) | 20 (C1/2) | SpBE3 | 664-666 |
| | | CUUCCCUUGGCAGUUGAGCA | (CGCG) | 20 (C5/6) | VRER-SpBE3 | |
| | | GUGCCCUUCCCUUGGCAGUU | (GAG) | 20 (C10/11) | SpBE3 | |
| P279S/L | CCT to TCT | GGUCCAGCCUGUGGGGCCAC | (TGG) | 20 (C8/9) | SpBE3 | 667-674 |
| | or | GUCCAGCCUGUGGGGCCACU | (GGTG) | 20 (C7/8) | VQR-SpBE3 | |
| | CCT to CTT | CCAGCCUGUGGGGCCACUGG | (TGG) | 20 (C5/6) | SpBE3 | |
| | | CAGCCUGUGGGGCCACUGGU | (GGTG) | 20 (C4/5) | VQR-SpBE3 | |
| | | GUCCAGCCUGUGGGGCCACU | (GGTGGT) | 20 (C7/8) | KKH-SaBE3 | |
| | | CUGGUCCAGCCUGUGGGGCC | (ACTGGT) | 20 (C10/11) | KKH-SaBE3 | |
| | | GGUCCAGCCUGUGGGGCCAC | (TGGTG) | 20 (C8/9) | St3BE3 | |
| | | CCAGCCUGUGGGGCCACUGG | (TGGTG) | 20 (C5/6) | St3BE3 | |
| G281R | GGG to AGG | GCCCCACAGGCUGGACCAGC | (TGG) | 20 (C4/5) | SpBE3 | 675-677 |
| | | AGUGGCCCCACAGGCUGGAC | (CAG) | 20 (C8/9) | SpBE3 | |
| | | CACCAGUGGCCCCACAGGCU | (GGAC) | 20 (C12/13) | VQR-SpBE3 | |
| P282S/L | CCA to TCA or | CCACUGGUGGUGCUGCUGCCCC | (TGG) | 22 (C−1/−2) | SpBE3 | 678 |
| | CCA to CTA | | | | | |
| P288S/L | CCC to CTC or | UGGUGCUGCUGCCCCUGGCG | (GGTG) | 20 (C12/13) | VQR-SpBE3 | 679-685 |
| | CCC to TCC | GUGCUGCUGCCCCUGGCGGG | (TGG) | 20 (C10/11) | SpBE3 | |
| | | UGCUGCUGCCCCUGGCGGGU | (GGG) | 20 (C9/10) | SpBE3 | |
| | | CUGCCCCUGGCGGGUGGGUA | (CAG) | 20 (C4/5) | SpBE3 | |
| | | CCCCUGGCGGGUGGGUACAGC | (CGCG) | 21 (C1/−1) | VRER-SpBE3 | |
| | | GGUGCUGCUGCCCCUGGCGG | (GTGGGT) | 20 (C11/12) | SaBE3 | |
| | | GUGGUGCUGCUGCCCCUGGC | (GGGTG) | 20 (C13/14) | St3BE3 | |
| G292R/E | GGG to AGG | UACCCACCCGCCAGGGGCAG | (CAG) | 20 (C4/5) | SpBE3 | 686-693 |
| | or | CUGUACCCACCCGCCAGGGG | (CAG) | 20 (C7/8) | SpBE3 | |
| | GGG to GAG | GCGGCUGUACCCACCCGCCA | (GGGG) | 20 (C11/12) | VQR-SpBE3 | |
| | | CGGCUGUACCCACCCGCCAG | (GGG) | 20 (C10/11) | SpBE3 | |
| | | CGCGGCUGUACCCACCCGCC | (AGGG) | 20 (C12/13) | VQR-SpBE3 | |
| | | GCGGCUGUACCCACCCGCCA | (GGG) | 20 (C11/12) | SpBE3 | |
| | | CGCGGCUGUACCCACCCGCC | (AGG) | 20 (C12/13) | SpBE3 | |
| | | CGCGGCUGUACCCACCCGCC | (AGGGG) | 20 (C12/13) | St3BE3 | |
| C301Y | TGC to TAC | GGCGCUGGCAGGCGGCGUUG | (AGG) | 20 (C9) | SpBE3 | 694-699 |
| | | GGCAGGCGGCGUUGAGGACG | (CGG) | 20 (C3) | SpBE3 | |
| | | GUGGCAGGCGGCGUUGAGGA | (CGCG) | 20 (C5) | VRER-SpBE3 | |
| | | GCGCUGGCAGGCGGCGUUGA | (GGAC) | 20 (C8) | VQR-SpBE3 | |
| | | AGGCGCUGGCAGGCGGCGUU | (GAG) | 20 (C10) | SpBE3 | |
| | | CAGGCGCUGGCAGGCGGCGU | (TGAG) | 20 (C11) | EQR-SpBE3 | |
| C323Y | TGC to TAC | GGCAUCGUCCCGGAAGUUGC | (CGG) | 20 (C3) | SpBE3 | 700-704 |
| | | AGAGGCAGGCAUCGUCCCGG | (AAG) | 20 (C10) | SpBE3 | |
| | | GUAGAGGCAGGCAUCGUCCC | (GGAA) | 20 (C12) | VQR-SpBE3 | |
| | | AGUAGAGGCAGGCAUCGUCC | (CGG) | 20 (C13) | SpBE3 | |
| | | GUAGAGGCAGGCAUCGUCCC | (GGAAGT) | 20 (C12) | KKH-SaBE3 | |
| P327S/L | CCA to TCA or | UAGUCCCCAGCCUGAGCUCC | (CGAG) | 20 (C7/8) | EQR-SpBE3 | 705-713 |
| | CCA to CTA | ACUCCCCAGCCUCAGCUCCC | (GAG) | 20 (C6/7) | SpBE3 | |
| | | CUCCCCAGCCUCAGCUCCCG | (AGG) | 20 (C5/6) | SpBE3 | |
| | | CCCAGCCUCAGCUCCCGAGG | (TAG) | 20 (C3/4) | SpBE3 | |
| | | CCAGCCUCAGCUCCCGAGGU | (AGG) | 20 (C2/3) | SpBE3 | |
| | | CCAGCCUCAGCUCCCGAGGUA | (GGTG) | 21 (C1/−1) | VQR-SpBE3 | |
| | | UACUCCCCAGCCUCAGCUCC | (CGAGGT) | 20 (C7/8) | KKH-SaBE3 | |
| | | CCCCAGCCUCAGCUCCCGAG | (GTAGGT) | 20 (C3/4) | KKH-SaBE3 | |
| | | CCAGCCUCAGCUCCCGAGGU | (AGGTG) | 20 (C1/2) | St3BE3 | |
| P331S/L | CCC to CTC or | CAGCCUCAGCUCCCGAGGUA | (GGTG) | 20 (C12/13) | VQR-SpBE3 | 714-718 |
| | CCC to TCC | UCAGCUCCCGAGGUAGGUGC | (TGG) | 20 (C7/8) | SpBE3 | |
| | | CAGCUCCCGAGGUAGGUGCU | (GGG) | 20 (C6/7) | SpBE3 | |
| | | AGCUCCCGAGGUAGGUGCUG | (GGG) | 20 (C5/6) | SpBE3 | |
| | | UCAGCUCCCGAGGUAGGUGC | (TGGGG) | 20 (C7/8) | St3BE3 | |
| G337R | GGG to AGG | CCAACUGUGAUGACCUGGAA | (AGG) | 20 (C1/2) | SpBE3 | 719-726 |
| | | CCAACUGUGAUGACCUGGAAA | (GGTG) | 21 (C1/−1) | VQR-SpBE3 | |
| | | CCCAACUGUGAUGACCUGGA | (AAG) | 20 (C2/3) | SpBE3 | |
| | | GGCCCCAACUGUGAUGACCU | (GGAA) | 20 (C5/6) | VQR-SpBE3 | |
| | | UGGCCCCAACUGUGAUGACC | (TGG) | 20 (C6/7) | SpBE3 | |
| | | AUUGGUGGCCCCAACUGUGA | (TGAC) | 20 (C11/12) | VQR-SpBE3 | |
| | | CCCCAACUGUGAUGACCUGG | (AAAGGT) | 20 (C3/4) | KKH-SaBE3 | |
| | | CCAACUGUGAUGACCUGGAA | (AGGTG) | 20 (C1/2) | St3BE3 | |
| P345S/L | CCG to TCG or | CCAAGACCAGCCGGUGACCC | (TGG) | 20 (C11/12) | SpBE3 | 727-734 |
| | CCG to CTG | CAAGACCAGCCGGUGACCCU | (GGG) | 20 (C10/11) | SpBE3 | |
| | | AAGACCAGCCGGUGACCCUG | (GGG) | 20 (C9/10) | SpBE3 | |
| | | AGACCAGCCGGUGACCCUGG | (GGAC) | 20 (C8/9) | VQR-SpBE3 | |
| | | GCCGGUGACCCUGGGGACUU | (TGG) | 20 (C2/3) | SpBE3 | |
| | | CCGGUGACCCUGGGGACUUU | (GGG) | 20 (C1/2) | SpBE3 | |
| | | CGGUGACCCUGGGGACUUUG | (GGG) | 20 (C1/−1) | SpBE3 | |
| | | CCAAGACCAGCCGGUGACCC | (TGGGG) | 20 (C11/12) | St3BE3 | |
| | | GCCGGUGACCCUGGGGACUU | (TGGGG) | 20 (C2/3) | St3BE3 | |
| C358Y | TGT to TAT | GUCCACACAGCGGCCAAAGU | (TGG) | 20 (C8) | SpBE3 | 735-738 |
| | | AGAGGUCCACACAGCGGCCA | (AAG) | 20 (C12) | SpBE3 | |
| | | CAGCGGCCAAAGUUGGUCCC | (CAAAGT) | 20 (C1) | KKH-SaBE3 | |
| | | AGGUCCACACAGCGGCCAAA | (GTTGGT) | 20 (C10) | KKH-SaBE3 | |
| P364S/L | CCA to TCA or | GACCUCUUUGCCCCAGGGGA | (GGAC) | 20 (C13/14) | VQR-SpBE3 | 739-743 |
| | CCA to CTA | GCCCCAGGGGAGGACAUCAU | (TGG) | 20 (C4/5) | SpBE3 | |
| | | CCCCAGGGGAGGACAUCAUU | (GGTG) | 20 (C3/4) | VQR-SpBE3 | |
| | | UUGCCCCAGGGGAGGACAUC | (ATTGGT) | 20 (C6/7) | KKH-SaBE3 | |
| | | GCCCCAGGGGAGGACAUCAU | (TGGTG) | 20 (C4/5) | St3BE3 | |
| G365R/E | GGG to AGG | CCUGGGGCAAAGAGGUCCAC | (ACAG) | 20 (C1/−1) | VQR-SpBE3 | 744-748 |
| | or | UGUCCUCCCCUGGGGCAAAG | (AGG) | 20 (C9/10) | SpBE3 | |
| | GGG to GAG | AUGUCCUCCCCUGGGGCAAA | (GAG) | 20 (C10/11) | SpBE3 | |
| | | GAUGUCCUCCCCUGGGGCAA | (AGAG) | 20 (C11/12) | EQR-SpBE3 | |
| | | GAUGUCCUCCCCUGGGGCAA | (AGAGGT) | 20 (C11/12) | KKH-SaBE3 | |
| G384R/E | GGG to AGG | CCACUCUGUGACACAAAGCA | (GGTG) | 20 (C1/2) | VQR-SpBE3 | 749-754 |
| | or | CCCACUCUGUGACACAAAGC | (AGG) | 20 (C2/3) | SpBE3 | |
| | GGG to GAG | UCCCACUCUGUGACACAAAG | (CAG) | 20 (C3/4) | SpBE3 | |
| | | AUGUCCCACUCUGUGACACA | (AAG) | 20 (C6/7) | SpBE3 | |
| | | GCCUGUGAUGUCCCACUCUG | (TGAC) | 20 (C13/14) | VQR-SpBE3 | |
| | | CCCACUCUGUGACACAAAGC | (AGGTG) | 20 (C2/3) | St3BE3 | |
| P404S/L | CCG to TCG or | UGCCGAGCCGGAGCUCACCC | (TGG) | 20 (C8/9) | SpBE3 | 755-758 |
| | CCG to CTG | GAGCCGGAGCUCACCCUGGC | (CGAG) | 20 (C4/5) | EQR-SpBE3 | |
| | | AGCCGGAGCUCACCCUGGCC | (GAG) | 20 (C3/4) | SpBE3 | |
| | | CGAGCCGGAGCUCACCCUGG | (CCGAGT) | 20 (C5/6) | SaBE3 | |
| P430S/L | CCT to TCT | AGGCCUGGUUCCCUGAGGAC | (CAG) | 20 (C12/13) | SpBE3 | 759-764 |
| | or | GGCCUGGUUCCCUGAGGACC | (AGCG) | 20 (C11/12) | VRER-SpBE3 | |
| | CCT to CTT | CCUGGUUCCCUGAGGACCAG | (CGG) | 20 (C9/10) | SpBE3 | |
| | | CUGGUUCCCUGAGGACCAGC | (GGG) | 20 (C8/9) | SpBE3 | |
| | | CCCUGAGGACCAGCGGGUAC | (TGAC) | 20 (C2/3) | VQR-SpBE3 | |
| | | GCCUGGUUCCCUGAGGACCA | (GCGGGT) | 20 (C10/11) | SaBE3 | |
| P438S/L | CCC to CTC | CCUGCCCCCCAGCACCCAUG | (GGG) | 20 (C10/11) | SpBE3 | 765-768 |
| | | CCCUGCCCCCCAGCACCCAU | (GGG) | 20 (C11/12) | SpBE3 | |
| | | GCGGGUACUGACCCCCAACC | (TGG) | 20 (C12/13) | SpBE3 | |
| | | CGGGUACUGACCCCCAACCU | (GGTG) | 20 (C13/14) | VQR-SpBE3 | |
| P445S/L | CCC to CTC or | CCUGCCCCCCAGCACCCAUG | (GGG) | 20 (C5,6,8,9) | SpBE3 | 769-775 |
| and | CCC to TCC | CCCUGCCCCCCAGCACCCAU | (GGG) | 20 (C6,7,9,10) | SpBE3 | |
| P446S/L | | GCCCUGCCCCCCAGCACCCA | (TGG) | 20 (C7,8,10,11) | SpBE3 | |
| | | GCCCCCCAGCACCCAUGGGG | (CAG) | 20 (C2,3,5,6) | SpBE3 | |
| | | CCCCCCAGCACCCAUGGGGC | (AGG) | 20 (C1,2,4,5,) | SpBE3 | |
| | | UGCCCCCCAGCACCCAUGGG | (GCAGGT) | 20 (C3,4,6,7) | KKH-SaBE3 | |
| | | GCCCUGCCCCCCAGCACCCA | (TGGGG) | 20 (C7,8,10,11) | St3BE3 | |
| P446S/L | CCC to CTC or | CCCAGCACCCAUGGGGCAGGU | (AAG) | 21 (C1/−1) | SpBE3 | 776 |
| | CCC to TCC | | | | | |
| G450R/E | GGG to AGG | CCAUGGGUGCUGGGGGGCAG | (GGCG) | 20 (C1/2) | VRER-SpBE3 | 777-794 |
| | or | CCCCAUGGGUGCUGGGGGGC | (AGGG) | 20 (C3/4) | VQR-SpBE3 | |
| | GGG to GAG | CCCAUGGGUGCUGGGGGGCA | (GGG) | 20 (C2/3) | SpBE3 | |
| | | CCCCAUGGGUGCUGGGGGGC | (AGG) | 20 (C3/4) | SpBE3 | |
| | | GCCCCAUGGGUGCUGGGGGG | (CAG) | 20 (C4/5) | SpBE3 | |
| | | ACCUGCCCCAUGGGUGCUGG | (GGGG) | 20 (C8/9) | VQR-SpBE3 | |
| | | CCUGCCCCAUGGGUGCUGGG | (GGG) | 20 (C7/8) | SpBE3 | |
| | | UACCUGCCCCAUGGGUGCUG | (GGGG) | 20 (C9/10) | VQR-SpBE3 | |
| | | ACCUGCCCCAUGGGUGCUGG | (GGG) | 20 (C8/9) | SpBE3 | |
| | | UUACCUGCCCCAUGGGUGCU | (GGGG) | 20 (C10/11) | VQR-SpBE3 | |
| | | UACCUGCCCCAUGGGUGCUG | (GGG) | 20 (C9/10) | SpBE3 | |
| | | UUACCUGCCCCAUGGGUGCU | (GGG) | 20 (C10/11) | SpBE3 | |
| | | CUUACCUGCCCCAUGGGUGC | (TGGG) | 20 (C11/12) | SpBE3 | |
| | | CUUACCUGCCCCAUGGGUGC | (TGG) | 20 (C11/12) | SpBE3 | |
| | | CCCAUGGGUGCUGGGGGGCA | (GGGCG) | 20 (C2/3) | St3BE3 | |
| | | UACCUGCCCCAUGGGUGCUG | (GGGGG) | 20 (C9/10) | St3BE3 | |
| | | UUACCUGCCCCAUGGGUGCU | (GGGGG) | 20 (C10/11) | St3BE3 | |
| | | CUUACCUGCCCCAUGGGUGC | (TGGGG) | 20 (C11/12) | St3BE3 | |
| C457Y | | CAAAACAGCUGCCAACCUGCAAA | (AAG) | 23 (C−3) | SpBE3 | 795 |
| P467S/L | CCT to TCT or | GGGGCCUACACGGAUGGCCA | (CAG) | 20 (C5/6) | SpBE3 | 796-797 |
| | CCT to CTT | ACACUCGGGGCCUACACGGA | (TGG) | 20 (C11/12) | SpBE3 | |
| C477Y | TGC to TAC | GGCGCAGCGGGCGACGGCUG | (TGG) | 20 (C5) | SpBE3 | 798-800 |
| | | GGGGCGCAGCGGGCGACGGC | (TGTG) | 20 (C7) | VQR-SpBE3 | |
| | | AUCUGGGGCGCAGCGGGCGA | (CGG) | 20 (C11) | SpBE3 | |
| P478S/L | CCA to TCA or | GCCCCAGAUGAGGAGCUGCU | (GAG) | 20 (C4/5) | SpBE3 | 801-804 |
| | CCA to CTA | GCCCGCUGCGCCCCAGAUGA | (GGAG) | 20 (C13) | EQR-SpBE3 | |
| | | CCCGCUGCGCCCCAGAUGAG | (GAG) | 20 (C12/13) | SpBE3 | |
| | | CGCCCCAGAUGAGGAGCUGC | (TGAG) | 20 (C5/6) | EQR-SpBE3 | |
| C486Y | TGC to TAC | CAGCUCAGCAGCUCCUCAUC | (TGG) | 20 (C1) | SpBE3 | 805-809 |
| | | CAGCUCAGCAGCUCCUCAUC | (TGGG) | 20 (C1) | VQR-SpBE3 | |
| | | CAGCUCAGCAGCUCCUCAUCU | (GGG) | 21 (C−1) | SpBE3 | |
| | | GAGAAACUGGAGCAGCUCAG | (CAG) | 20 (C13) | SpBE3 | |
| | | CAGCUCAGCAGCUCCUCAUC | (TGGGG) | 20 (C1) | St3BE3 | |
| G493R/E | GGG to AGG | CUUCCCACUCCUGGAGAAAC | (TGG) | 20 (C5/6) | SpBE3 | 810-816 |
| | or | UCCCACUCCUGGAGAAACUG | (GAG) | 20 (C3/4) | SpBE3 | |
| | GGG to GAG | UUCCCACUCCUGGAGAAACU | (GGAG) | 20 (C4/5) | EQR-SpBE3 | |
| | | CCGCCGCUUCCCACUCCUGG | (AGAA) | 20 (C11/12) | SpBE3 | |
| | | CCCGCCGCUUCCCACUCCUG | (GAG) | 20 (C12/13) | SpBE3 | |
| | | CUUCCCACUCCUGGAGAAAC | (TGGAG) | 20 (C5/6) | St3BE3 | |
| | | CCCCGCCGCUUCCCACUCCU | (GGAGAAA) | 20 (C13/14) | St1BE3 | |
| G504R/E | GGG to AGG | CCCUUGGGCCUUAGAGUCAA | (AGAC) | 20 (C2/3) | VQR-SpBE3 | 817-822 |
| | or | CCCCUUGGGCCUUAGAGUCA | (AAG) | 20 (C3/4) | SpBE3 | |
| | GGG to GAG | GCUUGCCCCCUUGGGCCUUA | (GAG) | 20 (C9/10) | SpBE3 | |
| | | AGCUUGCCCCCUUGGGCCUU | (AGAG) | 20 (C10/11) | EQR-SpBE3 | |
| | | CAGCUUGCCCCCUUGGGCCU | (TAG) | 20 (C12/13) | SpBE3 | |
| | | CAGCUUGCCCCCUUGGGCCU | (TAGAGT) | 20 (C11/12) | SaBE3 | |
| C509Y | TGC to TAC | GGCAGACCAGCUUGCCCCCU | (TGG) | 20 (C3) | SpBE3 | 823-825 |
| | | GGCAGACCAGCUUGCCCCCU | (TGGG) | 20 (C3) | VQR-SpBE3 | |
| | | GCAGACCAGCUUGCCCCCUU | (GGG) | 20 (C2) | SpBE3 | |
| G516R/E | GGG to AGG | CCCCAAAAGCGUUGUGGGCC | (CGG) | 20 (C3/4) | SpBE3 | 826-830 |
| | or | CUCACCCCCAAAAGCGUUGU | (GGG) | 20 (C8/9) | SpBE3 | |
| | GGG to GAG | CCUCACCCCCAAAAGCGUUG | (TGGG) | 20 (C9/10) | VQR-SpBE3 | |
| | | CCUCACCCCCAAAAGCGUUG | (TGG) | 20 (C9/10) | SpBE3 | |
| | | ACCCUCACCCCCAAAAGCGU | (TGTG) | 20 (C10/11) | VQR-SpBE3 | |
| C526Y | TGC to TAC | GGCAGCACCUGGCAAUGGCG | (TAG) | 20 (C6/3) | SpBE3 | 831-836 |
| and | | GCAGCACCUGGCAAUGGCGU | (AGAC) | 20 (C5/2) | VQR-SpBE3 | |
| C527Y | | AGCAGGCAGCACCUGGCAAU | (GGCG) | 20 (C10/7) | VRER-SpBE3 | |
| | | UAGCAGGCAGCACCUGGCAA | (TGG) | 20 (C11/8) | SpBE3 | |
| | | CAUGGCACCCACCUGGCAGG | (GGTGGT) | 20 (C12/9) | KKH-SaBE3 | |
| | | UAGCAGGCAGCACCUGGCAA | (TGGCG) | 20 (C8/5) | St3BE3 | |
| P530S/L | CCC to CTC or | CUGCUACCCCAGGCCAACUG | (CAG) | 20 (C7/8) | SpBE3 | 837, 838 |
| | CCC to TCC | UGCUACCCCAGGCCAACUGC | (AGCG) | 20 (C6/7) | VRER-SpBE3 | |
| C534Y | TGC to TAC | ACGCUGCAGUUGGCCUGGGG | (TAG) | 20 (C7) | SpBE3 | 839-848 |
| | | UGCAGUUGGCCUGGGGUAGC | (AGG) | 20 (C3) | SpBE3 | |
| | | CUGCAGUUGGCCUGGGGUAG | (GAG) | 20 (C4) | SpBE3 | |
| | | GUGGACGCUGCAGUUGGCCU | (GGGG) | 20 (C11) | VQR-SpBE3 | |
| | | UGGACGCUGCAGUUGGCCUG | (GGG) | 20 (C10) | VQR-SpBE3 | |
| | | UGUGGACGCUGCAGUUGGCC | (TGGG) | 20 (C12) | VQR-SpBE3 | |
| | | GUGGACGCUGCAGUUGGCCU | (GGG) | 20 (C11) | VQR-SpBE3 | |
| | | UGUGGACGCUGCAGUUGGCC | (TGG) | 20 (C12) | SpBE3 | |
| | | UGUGGACGCUGCAGUUGGCC | (TGGGGT) | 20 (C12) | SaBE3 | |
| | | UGUGGACGCUGCAGUUGGCC | (TGGGG) | 20 (C12) | St3BE3 | |
| P540S/L | CCA to TCA or | GUCCACACAGCUCCACCAGC | (TGAG) | 20 (C13) | EQR-SpBE3 | 849-856 |
| and | CCA to CTA | UCCACACAGCUCCACCAGCU | (GAG) | 20 (C12/13) | SpBE3 | |
| P541S/L | | CCACACAGCUCCACCAGCUG | (AGG) | 20 (C11/12) | SpBE3 | |
| | | ACAGCUCCACCAGCUGAGGC | (CAG) | 20 (C7,8,10,11) | SpBE3 | |
| | | UCCACCAGCUGAGGCCAGCA | (TGG) | 20 (C2,3,5,6) | SpBE3 | |
| | | CCACCAGCUGAGGCCAGCAU | (GGG) | 20 (C1,2,4,5) | SpBE3 | |
| | | CCACCAGCUGAGGCCAGCAUG | (GGG) | 21 (C1,−1,3,4) | SpBE3 | |
| | | UCCACCAGCUGAGGCCAGCA | (TGGGG) | 20 (C2,3,5,6) | St3BE3 | |
| P541S/L | CCA to TCA or | ACCAGCUGAGGCCAGCAUGG | (GGAC) | 20 (C2/3) | VQR-SpBE3 | 857 |
| | CCA to CTA | | | | | |
| C552Y | TGC to TAC | CUGUUGGUGGCAGUGGACAC | (GGG) | 20 (C11) | SpBE3 | 858-860 |
| | | CCUGUUGGUGGCAGUGGACA | (CGGG) | 20 (C12) | VQR-SpBE3 | |
| | | CCUGUUGGUGGCAGUGGACA | (CGG) | 20 (C12) | VQR-SpBE3 | |
| P576S/L | CCG to TCG or | GCCGCCUGUGCUGAGGCCAC | (GAG) | 20 (C2,3,5,6) | SpBE3 | 861-867 |
| and/or | CCG to CTG | CCCACAAGCCGCCUGUGCUG | (AGG) | 20 (C9,10,12,13) | SpBE3 | |
| P557S/L | and/or | CCGCCUGUGCUGAGGCCACG | (AGG) | 20 (C1,2,4,5) | SpBE3 | |
| | CCT to TCT | AGCCGCCUGUGCUGAGGCCA | (CGAG) | 20 (C3,4,6,7) | EQR-SpBE3 | |
| | or | ACCCACAAGCCGCCUGUGCU | (GAG) | 20 (C10/11) | SpBE3 | |
| | CCT to CTT | CACCCACAAGCCGCCUGUGC | (TGAG) | 20 (C11/12) | EQR-SpBE3 | |
| | | AGCCGCCUGUGCUGAGGCCA | (CGAGGT) | 20 (C4,5,6,7) | KKH-SaBE3 | |
| P577S/L | CCT to TCT | CCUGUGCUGAGGCCACGAGGU | (CAG) | 21 (C1/−1) | SpBE3 | 868 |
| | or | | | | | |
| | CCT to CTT | | | | | |
| P581S/L | CCA to TCA or | GGCCACGAGGUCAGCCCAAC | (CAG) | 20 (C3/4) | SpBE3 | 869-872 |
| | CCA to CTA | GCCACGAGGUCAGCCCAACC | (AGTG) | 20 (C2/3) | VQR-SpBE3 | |
| | | CCACGAGGUCAGCCCAACCAG | (TGCG) | 21 (C1/−1) | VRER-SpBE3 | |
| | | GAGGCCACGAGGUCAGCCCA | (ACCAGT) | 20 (C5/6) | KKH-SaBE3 | |
| P585S/L | CCC to CTC or | CACGAGGUCAGCCCAACCAG | (TGCG) | 20 (C12/13) | VRER-SpBE3 | 873-877 |
| | CCC to TCC | CGAGGUCAGCCCAACCAGUG | (CGTG) | 20 (C10/11) | VQR-SpBE3 | |
| | | GGUCAGCCCAACCAGUGCGU | (GGG) | 20 (C4,7,8) | SpBE3 | |
| | | AGGUCAGCCCAACCAGUGCG | (TGG) | 20 (C5,8,9) | SpBE3 | |
| | | CCCAACCAGUGCGUGGGCCA | (CAG) | 20 (C1/2) | SpBE3 | |
| C588Y | TGC to TAC | CACUGGUUGGGCUGACCUCG | (TGG) | 20 (C1) | SpBE3 | 878-880 |
| | | CGCACUGGUUGGGCUGACCU | (CGTG) | 20 (C3) | VQR-SpBE3 | |
| | | GGCCCACGCACUGGUUGGGC | (TGAC) | 20 (C9) | VQR-SpBE3 | |
| C600Y | TGC to TAC | GCAGCAGGAAGCGUGGAUGC | (TGG) | 20 (C5/2) | SpBE3 | 881-883 |
| and | | GGCAUGGCAGCAGGAAGCGU | (GGAT) | 20 (C11/8) | VQR-SpBE3 | |
| C601Y | | GGGGCAUGGCAGCAGGAAGC | (GTGGAT) | 20 (C13/10) | VRER-SpBE3 | |
| C601Y | TGC to TAC | GGGCAUGGCAGCAGGAAGCG | (TGG) | 20 (C9) | SpBE3 | 884-886 |
| | | UGGGGCAUGGCAGCAGGAAG | (CGTG) | 20 (C10) | VQR-SpBE3 | |
| | | CCUGGGGCAUGGCAGCAGGA | (AGCG) | 20 (C12) | VRER-SpBE3 | |
| P604S/L | CCA to TCA or | UGCCCCAGGUCUGGAAUGCA | (AAG) | 20 (C5/6) | SpBE3 | 887-889 |
| | CCA to CTA | UGCUGCCAUGCCCCAGGUCU | (GGAA) | 20 (C13) | VQR-SpBE3 | |
| | | CAUGCCCCAGGUCUGGAAUG | (CAAAGT) | 20 (C7/8) | KKH-SaBE3 | |
| C608Y | TGC to TAC | GACUUUGCAUUCCAGACCUG | (GGG) | 20 (C8) | SpBE3 | 890-896 |
| | | UGCAUUCCAGACCUGGGGCA | (TGG) | 20 (C3) | SpBE3 | |
| | | UGACUUUGCAUUCCAGACCU | (GGGG) | 20 (C9) | VQR-SpBE3 | |
| | | UGACUUUGCAUUCCAGACCU | (GGG) | 20 (C9) | SpBE3 | |
| | | UUGACUUUGCAUUCCAGACC | (TGGG) | 20 (C10) | VQR-SpBE3 | |
| | | UUGACUUUGCAUUCCAGACC | (TGG) | 20 (C10) | SpBE3 | |
| | | UUGACUUUGCAUUCCAGACC | (TGGGG) | 20 (C10) | St3BE3 | |
| P616S/L | CCG to TCG or | GCAUGGAAUCCCGGCCCCUC | (AGG) | 20 (C11/12) | SpBE3 | 897-907 |
| and/or | CCG to CTG | CAUGGAAUCCCGGCCCCUCA | (GGAG) | 20 (C10/11) | EQR-SpBE3 | |
| P618S/L | and/or | AUGGAAUCCCGGCCCCUCAG | (GAG) | 20 (C9/10) | SpBE3 | |
| | CCT to TCT | GAAUCCCGGCCCCUCAGGAG | (CAG) | 20 (C6/7) | SpBE3 | |
| | or | AAUCCCGGCCCCUCAGGAGC | (AGG) | 20 (C5,6,11,12) | SpBE3 | |
| | CCT to CTT | AUCCCGGCCCCUCAGGAGCA | (GGTG) | 20 (C4,5,10,11) | VQR-SpBE3 | |
| | | CCCGGCCCCUCAGGAGCAGG | (TGAA) | 20 (C2,3,8,9) | VQR-SpBE3 | |
| | | CCGGCCCCUCAGGAGCAGGUG | (AAG) | 21 (C1,−1,6,7) | SpBE3 | |
| | | GGAAUCCCGGCCCCUCAGGA | (GCAGGT) | 20 (C7/8) | KKH-SaBE3 | |
| | | GCAUGGAAUCCCGGCCCCUC | (AGGAG) | 20 (C10/11) | St3BE3 | |
| | | AAUCCCGGCCCCUCAGGAGC | (AGGTG) | 20 (C5,6,11,12) | St3BE3 | |
| P618S/L | CCT to TCT | GGCCCCUCAGGAGCAGGUGA | (AGAG) | 20 (C5/6) | EQR-SpBE3 | 908-911 |
| | or | GCCCCUCAGGAGCAGGUGAA | (GAG) | 20 (C4/5) | SpBE3 | |
| | CCT to CTT | CCCCUCAGGAGCAGGUGAAG | (AGG) | 20 (C3/4) | SpBE3 | |
| | | GGAAUCCCGGCCCCUCAGGA | (GCAGGT) | 20 (C12/13) | KKH-SaBE3 | |
| C626Y | TGC to TAC | CGCAGGCCACGGUCACCUGC | (GAG) | 20 (C3) | SpBE3 | 912-914 |
| | | CAGGCCACGGUCACCUGCCA | (GAG) | 20 (C1) | SpBE3 | |
| | | GCAGGCCACGGUCACCUGCC | (AGAG) | 20 (C2) | EQR-SpBE3 | |
| C635Y | TGC to TAC | CACUGCAGCCAGUCAGGGUC | (CAG) | 20 (C6) | SpBE3 | 915-918 |
| | | GGAGGGCACUGCAGCCAGUC | (AGGG) | 20 (C12) | VQR-SpBE3 | |
| | | GAGGGCACUGCAGCCAGUCA | (GGG) | 20 (C11) | VQR-SpBE3 | |
| | | GGAGGGCACUGCAGCCAGUC | (AGG) | 20 (C13) | SpBE3 | |
| P639S/L | CCT to TCT | CCCUGGGACCUCCCACGUCC | (TGG) | 20 (C2/3) | SpBE3 | 919-922 |
| | or | CCUGGGACCUCCCACGUCCU | (GGG) | 20 (C1/2) | SpBE3 | |
| | CCT to CTT | CCCUGGGACCUCCCACGUCC | (TGGGG) | 20 (C2/3) | St3BE3 | |
| | | CCUGGGACCUCCCACGUCCU | (GGGGG) | 20 (C1/2) | St3BE3 | |
| G640R/E | GGG to AGG or | CCCAGGGAGGGCACUGCAGC | (CAG) | 20 (C2/3) | SpBE3 | 923-925 |
| | GGG to GAG | AGGUCCCAGGGAGGGCACUG | (CAG) | 20 (C6/7) | VQR-SpBE3 | |
| | | GUCCCAGGGAGGGCACUGCA | (GCCAGT) | 20 (C4/6) | KKH-SaBE3 | |
| C654Y | TGT to TAT | GACUACACACGUGUUGUCUA | (CGG) | 20 (C8) | SpBE3 | 926-930 |
| | | ACACGUGUUGUCUACGGCGU | (AGG) | 20 (C2) | SpBE3 | |
| | | CACACGUGUUGUCUACGGCG | (TAG) | 20 (C3) | SpBE3 | |
| | | ACUACACACGUGUUGUCUAC | (GGCG) | 20 (C7) | VRER-SpBE3 | |
| | | GACUACACACGUGUUGUCUA | (CGGCG) | 20 (08) | St3BE3 | |
| G670R/E | GGG to AGG | CCCUUCGCUGGUGCUGCCUG | (TAG) | 20 (C2/3) | SpBE3 | 931-935 |
| | | CCUUCGCUGGUGCUGCCUGU | (AGTG) | 20 (C1/2) | VQR-SpBE3 | |
| | | GCUGUCACGGCCCCUUCGCU | (GGTG) | 20 (C13/14) | VQR-SpBE3 | |
| | | GGCUGUCACGGCCCCUUCGC | (TGG) | 20 (C12/13) | SpBE3 | |
| | | GCCCCUUCGCUGGUGCUGCC | (TGTAGT) | 20 (C4/5) | KKH-SaBE3 | |
| C678Y | TGC to TAC | GCAGAUGGCAACGGCUGUCA | (CGG) | 20 (C2) | SpBE3 | 936, 937 |
| and | | GCUCCGGCAGCAGAUGGCAA | (CGG) | 20 (C11/8) | SpBE3 | |
| C679Y | | | | | | |

*Guide sequences (the portion of the guide RNA that targets the nucleobase editor to the target sequence) are provided, which may be used with any tracrRNA framework sequences provided herein to generate the full guide RNA sequence
^{a}BE types: SpBE3 = APOBEC1-SpCas9n-UGI; VQR-SpBE3 = APOBEC1-VQR-SpCas9n-UGI; EQR-SpBE3 = APOBEC1-EQR-SpCas9n-UGI; VRER-SpBE3 = APOBEC1-VRER-SpCas9n-UGI; SaBE3 = APOBEC1-SaCas9n-UGI; KKH-SaBE3 = APOBEC1-KKH-SaCas9n-UGI; St3BE3 = APOBEC1-St3Cas9n-UGI; St1BE3 = APOBEC1-St1Cas9n-UGI.

[0139] In some embodiments, PCSK9 variants comprising more than one mutations described herein are contemplated. For example, a PCSK9 variant may be produced using the methods described herein that includes 1, 2, 3, 4, 5, 6, 7, 8, 9, 10, or more mutations selected from Tables 3 and 4. To make multiple mutations in the PCSK9 gene, a plurality of guide nucleotide sequences may be used, each guide nucleotide sequence targeting one target base. The nucleobase editor is capable of editing each and every base dictated by the guide nucleotide sequence. For example, 1, 2, 3, 4, 5, 6, 7, 8, 9, 10, or more guide nucleotide sequences may be used in a gene editing reaction. In some embodiments, the guide nucleotide sequences are RNAs (e.g., gRNA). In some embodiments, the guide nucleotide sequences are single stranded DNA molecules.

### Premature Stop Codons

[0140] Some aspects of the present disclosure provide strategies of editing PCSK9 gene to reduce the amount of full-length, functional PCSK9 protein being produced. In some embodiments, stop codons may be introduced into the coding sequence of PCSK9 gene upstream of the normal stop codon (referred to as a “premature stop codon”). Premature stop codons cause premature translation termination, in turn resulting in truncated and nonfunctional proteins and induces rapid degradation of the mRNA via the non-sense mediated mRNA decay pathway. See, e.g., Baker et al., Current Opinion in Cell Biology 16 (3): 293-299, 2004; Chang et al., Annual Review of Biochemistry 76: 51-74, 2007; and Behm-Ansmant et al., Genes & Development 20 (4): 391-398, 2006, each of which is incorporated herein by reference.

[0141] The nucleobase editors described herein may be used to convert several amino acid codons to a stop codon (e.g., TAA, TAG, or TGA). For example, nucleobase editors including a cytosine deaminase domain are capable of converting a cytosine (C) base to a thymine (T) base via deamination. Thus, it is envisioned that, for amino acid codons containing a C base, the C base may be converted to T. For example, a CAG (Gln/Q) codon may be changed to a TAG (amber) codon via the deamination of the first C on the coding strand. For sense codons that contain a guanine (G) base, a C base is present on the complementary strand; and the G base may be converted to an adenosine (A) via the deamination of the C on the complementary strand. For example, a TGG (Trp/W) codon may be converted to a TAG (amber) codon via the deamination of the second C on the complementary strand. In some embodiments, two C to T changes are required to convert a codon to a nonsense codon. For example, a CGG (R) codon is converted to a TAG (amber) codon via the deamination of the first C on the coding strand and the deamination of the second C on the complementary strand. Non-limiting examples of codons that may be changed to stop codons via base editing are provided in Table 5.

TABLE 5
Conversion to Stop Codon

| Target codon | Base-editing process | Edited codon |
|---|---|---|
| CAG (Gln/Q) | 1^{st} base C to T on coding strand | TAG (amber) |
| TGG (Trp/W) | 2^{nd} base C to T on complementary | TAG (amber) |
| | strand | |
| CGA (Arg/R) | 1^{st} base C to T on coding strand | TGA (opal) |
| CAA (Gln/Q) | 1^{st} base C to T on coding strand | TAA (ochre) |
| TGG (Trp/W) | 3^{rd} base C to T on complementary | TGA (opal) |
| | strand | |
| CGG (Arg/R) | 1^{st} base C to T on coding strand and | TAG (amber) |
| | 2^{nd} base C to T on complementary | |
| | strand | |
| CGA (Arg/R) | 1^{st} base C to T on coding strand and | TAA (orchre) |
| | 2^{nd} base C to T on complementary | |
| | strand | |

*single underline: changes on the coding strand double underline: changes on the complementary strand

[0142] Accordingly, the present disclosure provides non-limiting examples of amino acid codons that may be converted to premature stop codons in PCSK9 gene. In some embodiments, the introduction of stop codons may be efficacious in generating truncations when the target residue is located in a flexible loop. In some embodiments, two codons adjacent to each other may both be converted to stop codons, resulting in two stop codons adjacent to each other (also referred to as “tandem stop codons”). “Adjacent” means there are no more than 5 amino acids between the two stop codons. For example, the two stop codons may be immediately adjacent to each other (0 amino acids in between) or have 1, 2, 3, 4, or 5 amino acids in between. The introduction of tandem stop codons may be especially efficacious in generating truncation and nonfunctional PCSK9 mutations. Non-limiting examples of tandem stop codons that may be introduced include: W10X-W11X, Q99X-Q101X, Q342X-Q344X, and Q554X-Q555X, wherein X indicates the stop codon. In some embodiments, a stop codon may be introduced after a structurally destabilizing mutation (e.g., the structurally destabilizing mutations listed in Table 2) to effectively produce truncation PCSK9 proteins. Non-limiting examples of a structurally destabilizing mutation followed by a stop codon include: P530S/L-Q531X, P581S/L-R582X, and P618S/L-Q619X, wherein X indicates the stop codon.

[0143] Exemplary codons that may be changed to stop codons by the nucleobase editors described herein and the guide nucleotide sequence that may be used are listed in Table 6. The examples are for illustration purpose only and are not meant to be limiting.

TABLE 6
Introducing Premature Stop Codon into PCSK9 Gene via Base Editing

| Target | Stop | Predicted | | | gRNA size | | SEQ |
|---|---|---|---|---|---|---|---|
| codon | codon | truncation* | guide sequence | (PAM) | (C edited) | BE type^{a} | ID NO |
| W10 | TAG | ++ | CCAGGACCGCCUGGAGCUGAC | (GGTG) | 21 (C−1) | VQR-SpBE3 | 938-946 |
| (TGG) | or | | CCAGGACCGCCUGGAGCUGA | (CGG) | 20 (C1) | SpBE3 | |
| and/or | TGA | | CCACCAGGACCGCCUGGAGC | (TGAC) | 20 (C4,5,1,2) | VQR-SpBE3 | |
| W11 | | | GCGGCCACCAGGACCGCCUG | (GAG) | 20 (C8,9,5,6) | SpBE3 | |
| (TGG) | | | AGCGGCCACCAGGACCGCCU | (GGAG) | 20 (C9,10,6,7) | EQR-SpBE3 | |
| | | | CAGCGGCCACCAGGACCGCC | (TGG) | 20 (C10,11,7,8) | SpBE3 | |
| | | | CACCAGGACCGCCUGGAGCU | (GACGGT) | 20 (C3,4,1) | KKH-SaBE3 | |
| | | | CCAGGACCGCCUGGAGCUGA | (CGGTG) | 20 (C−1) | St3BE3 | |
| | | | CAGCGGCCACCAGGACCGCC | (TGGAG) | 20 (C10,11,7,8) | St3BE3 | |
| Q31 | TAG | + | GGCGCCCGUGCGCAGGAGGA | (CGAG) | 20 (C13) | EQR-SpBE3 | 947-954 |
| (CAG) | | | GCGCCCGUGCGCAGGAGGAC | (GAG) | 20 (C12) | SpBE3 | |
| | | | CGCCCGUGCGCAGGAGGACG | (AGG) | 20 (C11) | SpBE3 | |
| | | | GCCCGUGCGCAGGAGGACGA | (GGAC) | 20 (C10) | VQR-SpBE3 | |
| | | | CGUGCGCAGGAGGACGAGGA | (CGG) | 20 (C7) | SpBE3 | |
| | | | GUGCGCAGGAGGACGAGGAC | (GGCG) | 20 (C6) | VRER-SpBE3 | |
| | | | GCGCAGGAGGACGAGGACGG | (CGAC) | 20 (C4) | VQR-SpBE3 | |
| | | | CGUGCGCAGGAGGACGAGGA | (CGGCG) | 20 (C7) | St3BE3 | |
| W77 | TAG | + | CAGGCAACCUCCACGGAUCC | (TGG) | 20 (C11/12) | SpBE3 | 955 |
| (TGG) | or | | | | | | |
| | TGA | | | | | | |
| Q90 | TAG | + | GACCCACCUCUCGCAGUCAG | (AGCG) | 20 (C14*) | VRER-SpBE3 | 956 |
| (CAG) | | | | | | | |
| Q99 | TAG | ++ with | UGCAGGCCCAGGCUGCCCGC | (CGG) | 20 (C3/9) | SpBE3 | 957-961 |
| (CAG) | | Q101X | GCAGGCCCAGGCUGCCCGCC | (GGG) | 20 (C2/8) | SpBE3 | |
| and/or | | | CAGGCCCAGGCUGCCCGCCG | (GGG) | 20 (C1/7) | SpBE3 | |
| Q101 | | | GCAGGCCCAGGCUGCCCGCC | (GGGGAT) | 20 (C2/8) | SaBE3 | |
| (CAG) | | | UGCAGGCCCAGGCUGCCCGC | (CGGGG) | 20 (C3/9) | St3BE3 | |
| Q101 | TAG | ++ with | AGGCCCAGGCUGCCCGCCGG | (GGAT) | 20 (C6) | EQR-SpBE3 | 962 |
| (CAG) | | Q99X | | | | | |
| Q152 | TAG | ++ | UGUCUUUGCCCAGAGCAUCC | (CGTG) | 20 (C10) | VQR-SpBE3 | 963-967 |
| (CAG) | | | UCUUUGCCCAGAGCAUCCCG | (TGG) | 20 (C9) | SpBE3 | |
| | | | CUUUGCCCAGAGCAUCCCGU | (GGAA) | 20 (C7) | VQR-SpBE3 | |
| | | | CCAGAGCAUCCCGUGGAACC | (TGG) | 20 (C1) | SpBE3 | |
| | | | CCAGAGCAUCCCGUGGAACC | (TGGAG) | 20 (C1) | St3BE3 | |
| W156 | TAG | + | CCACGGGAUGCUCUGGGCAA | (AGAC) | 20 (C1/2) | VQR-SpBE3 | 968-972 |
| (TGG) | or | | UCCACGGGAUGCUCUGGGCA | (AAG) | 20 (C2/3) | SpBE3 | |
| | TGA | | CCAGGUUCCACGGGAUGCUC | (TGGG) | 20 (C8/9) | VQR-SpBE3 | |
| | | | CAGGUUCCACGGGAUGCUCU | (GGG) | 20 (C7/8) | SpBE3 | |
| | | | CCAGGUUCCACGGGAUGCUC | (TGG) | 20 (C8/9) | SpBE3 | |
| Q172 | TAG | ++ | GCGGAUGAAUACCAGCCCCC | (CGG) | 20 (C13) | SpBE3 | 973-975 |
| (CAG) | | | AUGAAUACCAGCCCCCCGGU | (AAG) | 20 (C9) | SpBE3 | |
| | | | UGAAUACCAGCCCCCCGGUA | (AGAC) | 20 (C8) | VQR-SpBE3 | |
| Q190 | TAG | ++ | CCAGCAUACAGAGUGACCAC | (CGG) | 20 (C9) | SpBE3 | 976-981 |
| (CAG) | | | CAGCAUACAGAGUGACCACC | (GGG) | 20 (C8) | SpBE3 | |
| | | | CCAGCAUACAGAGUGACCAC | (CGGG) | 20 (C7) | VQR-SpBE3 | |
| | | | AGCAUACAGAGUGACCACCG | (GGAA) | 20 (C7) | VQR-SpBE3 | |
| | | | CAGAGUGACCACCGGGAAAU | (CGAG) | 20 (C1) | EQR-SpBE3 | |
| | | | AGCAUACAGAGUGACCACCG | (GGAAAT) | 20 (C7) | KKH-SaBE3 | |
| Q219 | TAG | ++ | CUUCCACAGACAGGUAAGCA | (CGG) | 20 (C11) | SpBE3 | 982-984 |
| (CAG) | | | GACAGGUAAGCACGGCCGUC | (TGAT) | 20 (C3) | VQR-SpBE3 | |
| | | | CAGACAGGUAAGCACGGCCG | (TCTGAT) | 20 (C5) | KKH-SaBE3 | |
| Q256 | TAA | − | CGUGCUCAACUGCCAAGGGA | (AGG) | 20 (C14) | SpBE3 | 985-992 |
| (CAA) | | | GUGCUCAACUGCCAAGGGAA | (GGG) | 20 (C13) | SpBE3 | |
| | | | CGUGCUCAACUGCCAAGGGA | (AGGG) | 20 (C13) | VQR-SpBE3 | |
| | | | CAACUGCCAAGGGAAGGGCA | (CGG) | 20 (C8) | SpBE3 | |
| | | | UGCCAAGGGAAGGGCACGGU | (TAG) | 20 (C4) | SpBE3 | |
| | | | GCCAAGGGAAGGGCACGGUU | (AGCG) | 20 (C3) | VRER-SpBE3 | |
| | | | CAAGGGAAGGGCACGGUUAG | (CGG) | 20 (C1) | SpBE3 | |
| | | | CUCAACUGCCAAGGGAAGGG | (CACGGT) | 20 (C10) | KKH-SaBE3 | |
| Q275 | TAG | − | UUCGGAAAAGCCAGCUGGUC | (CAG) | 20 (C12) | SpBE3 | 993-996 |
| (CAG) | | | AAAAGCCAGCUGGUCCAGCC | (TGTG) | 20 (C7) | VQR-SpBE3 | |
| | | | AAGCCAGCUGGUCCAGCCUG | (TGG) | 20 (C5) | SpBE3 | |
| | | | AAGCCAGCUGGUCCAGCCUG | (TGGGG) | 20 (C5) | St3BE3 | |
| Q278 | TAG | + | AAGCCAGCUGGUCCAGCCUG | (TGG) | 20 (C14) | SpBE3 | 997-1008 |
| (CAG) | | | AGCCAGCUGGUCCAGCCUGU | (GGG) | 20 (C13/4) | SpBE3 | |
| and/or | | | GCCAGCUGGUCCAGCCUGUG | (GGG) | 20 (C12/3) | SpBE3 | |
| Q275 | | | AGCCAGCUGGUCCAGCCUGU | (GGGG) | 20 (C13/4) | SpBE3 | |
| (CAG) | | | GGUCCAGCCUGUGGGGCCAC | (TGG) | 20 (C5) | SpBE3 | |
| | | | GUCCAGCCUGUGGGGCCACU | (GGTG) | 20 (C4) | VQR-SpBE3 | |
| | | | CCAGCCUGUGGGGCCACUGG | (TGG) | 20 (C2) | SpBE3 | |
| | | | CAGCCUGUGGGGCCACUGGU | (GGTG) | 20 (C1) | VQR-SpBE3 | |
| | | | CUGGUCCAGCCUGUGGGGCC | (ACTGGT) | 20 (C7) | KKH-SaBE3 | |
| | | | GUCCAGCCUGUGGGGCCACU | (GGTGGT) | 20 (C4) | KKH-SaBE3 | |
| | | | GGUCCAGCCUGUGGGGCCAC | (TGGTG) | 20 (C5) | St3BE3 | |
| | | | CCAGCCUGUGGGGCCACUGG | (TGGTG) | 20 (C2) | St3BE3 | |
| Q302 | TAG | − | CAACGCCGCCUGCCAGCGCC | (TGG) | 20 (C14) | SpBE3 | 1009-1019 |
| (CAG) | | | AACGCCGCCUGCCAGCGCCU | (GGCG) | 20 (C13) | VRER-SpBE3 | |
| | | | CGCCGCCUGCCAGCGCCUGG | (CGAG) | 20 (C11) | EQR-SpBE3 | |
| | | | GCCGCCUGCCAGCGCCUGGC | (GAG) | 20 (C10) | SpBE3 | |
| | | | CCGCCUGCCAGCGCCUGGCG | (AGG) | 20 (C9) | SpBE3 | |
| | | | CGCCUGCCAGCGCCUGGCGA | (GGG) | 20 (C8) | SpBE3 | |
| | | | UGCCAGCGCCUGGCGAGGGC | (TGG) | 20 (C4) | SpBE3 | |
| | | | GCCAGCGCCUGGCGAGGGCU | (GGG) | 20 (C3) | SpBE3 | |
| | | | CCAGCGCCUGGCGAGGGCUG | (GGG) | 20 (C2) | SpBE3 | |
| | | | UGCCAGCGCCUGGCGAGGGC | (TGGGGT) | 20 (C4) | SaBE3 | |
| | | | UGCCAGCGCCUGGCGAGGGC | (TGGGG) | 20 (C4) | St3BE3 | |
| Q342 | TAA | ++ with | CACCAAUGCCCAAGACCAGC | (CGG) | 20 (C11) | SpBE3 | 1020-1028 |
| (CAA) | and/or | Q344X | ACCAAUGCCCAAGACCAGCC | (GGTG) | 20 (C10) | VQR-SpBE3 | |
| and/or | TAG | | CAAUGCCCAAGACCAGCCGG | (TGAC) | 20 (C8) | VQR-SpBE3 | |
| Q344 | | | CCAAGACCAGCCGGUGACCC | (TGG) | 20 (C2/8) | SpBE3 | |
| (CAG) | | | CAAGACCAGCCGGUGACCCU | (GGG) | 20 (C1/7) | SpBE3 | |
| | | | CAAGACCAGCCGGUGACCCUG | (GGG) | 21 (C−1/6) | SpBE3 | |
| | | | GCCACCAAUGCCCAAGACCA | (GCCGGT) | 20 (C13) | KKH-SaBE3 | |
| | | | CACCAAUGCCCAAGACCAGC | (CGGTG) | 20 (C11) | St3BE3 | |
| | | | CCAAGACCAGCCGGUGACCC | (TGGGG) | 20 (C2/8) | St3BE3 | |
| Q344 | TAG | ++ with | AGACCAGCCGGUGACCCUGG | (GGAC) | 20 (C5) | VQR-SpBE3 | 1029 |
| (CAG) | | Q342X | | | | | |
| Q382 | TAG | − | CUGCUUUGUGUCACAGAGUG | (GGAC) | 20 (C14) | VQR-SpBE3 | 1030-1032 |
| (CAG) | | | UGUCACAGAGUGGGACAUCA | (CAG) | 20 (C6) | SpBE3 | |
| | | | GUCACAGAGUGGGACAUCAC | (AGG) | 20 (C5) | SpBE3 | |
| Q387 | TAG | − | ACAUCACAGGCUGCUGCCCA | (CGTG) | 20 (C7) | VQR-SpBE3 | 1033-1036 |
| (CAG) | | | AUCACAGGCUGCUGCCCACG | (TGG) | 20 (C5) | SpBE3 | |
| | | | CAGGCUGCUGCCCACGUGGC | (TGG) | 20 (C1) | SpBE3 | |
| | | | CACAGGCUGCUGCCCACGUG | (GCTGGT) | 20 (C3) | KKH-SaBE3 | |
| Q413 | TAG | | GGCCGAGUUGAGGCAGAGAC | (TGAT) | 20 (C14) | VQR-SpBE3 | 1037 |
| (CAG) | | | | | | | |
| W428 | TAG | | AGGGAACCAGGCCUCAUUGA | (TGAC) | 20 (C7/8) | VQR-SpBE3 | 1038-1040 |
| (TGG) | or | | CUCAGGGAACCAGGCCUCAU | (TGAT) | 20 (C10/11) | VQR-SpBE3 | |
| | TGA | | UCCUCAGGGAACCAGGCCUC | (ATTGAT) | 20 (C11/12) | KKH-SaBE3 | |
| Q433 | TAG | | CCCUGAGGACCAGCGGGUAC | (TGAC) | 20 (C11) | VQR-SpBE3 | 1041-1042 |
| (CAG) | | | CAGCGGGUACUGACCCCCAA | (CCTGGT) | 20 (C1) | KKH-SaBE3 | |
| W453 | TAG | ++ | CAGCUGCCAACCUGCAAAAA | (GGG) | 20 (C8/9) | SpBE3 | 1043-1049 |
| (TGG) | or | | GCCAACCUGCAAAAAGGGCC | (TGGG) | 20 (C2/3) | VQR-SpBE3 | |
| | TGA | | GCCAACCUGCAAAAAGGGCC | (TGG) | 20 (C2/3) | SpBE3 | |
| | | | ACAGCUGCCAACCUGCAAAA | (AGGG) | 20 (C8/9) | VQR-SpBE3 | |
| | | | ACAGCUGCCAACCUGCAAAA | (AGG) | 20 (C8/9) | SpBE3 | |
| | | | AACAGCUGCCAACCUGCAAA | (AAG) | 20 (C9/10) | SpBE3 | |
| | | | GCCAACCUGCAAAAAGGGCC | (TGGGAT) | 20 (C2/3) | SaBE3 | |
| Q454 | TAG | ++ | GCAGGUUGGCAGCUGUUUUG | (CAG) | 20 (C10) | SpBE3 | 1050-1053 |
| (CAG) | | | CAGGUUGGCAGCUGUUUUGC | (AGG) | 20 (C9) | SpBE3 | |
| | | | AGGUUGGCAGCUGUUUUGCA | (GGAC) | 20 (C8) | VQR-SpBE3 | |
| | | | GCAGCUGUUUUGCAGGACUG | (TATGGT) | 20 (C2) | KKH-SaBE3 | |
| W461 | TAG | − | GACCAUACAGUCCUGCAAAA | (CAG) | 20 (C3/4) | SpBE3 | 1054 |
| (TGG) | or | | | | | | |
| | TGA | | | | | | |
| Q503 | TAG | + | UAAGGCCCAAGGGGGCAAGC | (TGG) | 20 (C8) | SpBE3 | 1055-1057 |
| (CAA) | | | ACUCUAAGGCCCAAGGGGGC | (AAG) | 20 (C12) | SpBE3 | |
| | | | UCUAAGGCCCAAGGGGGCAA | (GCTGGT) | 20 (C10) | KKH-SaBE3 | |
| Q531 | TAG | ++ with | CUGCUACCCCAGGCCAACUG | (CAG) | 20 (C10) | SpBE3 | 1058-1060 |
| (CAG) | | P530S | UGCUACCCCAGGCCAACUGC | (AGCG) | 20 (C9) | VQR-SpBE3 | |
| | | | CAGGCCAACUGCAGCGUCCAC | (CAG) | 22 (C−2) | SpBE3 | |
| | | | A | | | | |
| Q554 | TAG | ++ with | CCAACAGGGCCACGUCCUCA | (CAG) | 20 (C2/5) | SpBE3 | 1061-1065 |
| (CAA) | and/or | Q555X | CAACAGGGCCACGUCCUCAC | (AGG) | 20 (C1/4) | SpBE3 | |
| and/or | TAA | | CAGGGCCACGUCCUCACAGG | (TAG) | 20 (C1) | SpBE3 | |
| Q555 | | | CAGGGCCACGUCCUCACAGG | (AGG) | 21 (C−1) | SpBE3 | |
| (CAG) | | | U | | | | |
| | | | ACCAACAGGGCCACGUCCUC | (ACAGGT) | 20 (C3/6) | KKH-SaBE3 | |
| W566 | TAG | ++ | CCCAGUGGGAGCUGCAGCCU | (GGGG) | 20 (C2/3) | VQR-SpBE3 | 1066-1072 |
| (TGG) | or | | CCAGUGGGAGCUGCAGCCUG | (GGG) | 20 (C1/2) | SpBE3 | |
| | TGA | | UCCCAGUGGGAGCUGCAGCC | (TGGG) | 20 (C3/4) | VQR-SpBE3 | |
| | | | CCCAGUGGGAGCUGCAGCCU | (GGG) | 20 (C2/3) | SpBE3 | |
| | | | UCCCAGUGGGAGCUGCAGCC | (TGG) | 20 (C3/4) | SpBE3 | |
| | | | CCACCUCCCAGUGGGAGCUG | (CAG) | 20 (C7/8) | SpBE3 | |
| | | | UCCCAGUGGGAGCUGCAGCC | (TGGGG) | 20 (C4/5) | St3BE3 | |
| R582 | TGA | ++ with | GGCCACGAGGUCAGCCCAAC | (CAG) | 20 (C12/6) | SpBE3 | 1073-1077 |
| (CGA) | and/or | P581S/L | GCCACGAGGUCAGCCCAACC | (AGTG) | 20 (C11/5) | VQR-SpBE3 | |
| and/or | TAG | | CACGAGGUCAGCCCAACCAG | (TGCG) | 20 (C9/3) | VRER-SpBE3 | |
| Q584 | | | CGAGGUCAGCCCAACCAGUG | (CGTG) | 20 (C6/1) | VQR-SpBE3 | |
| (CAG) | | | GAGGCCACGAGGUCAGCCCA | (ACCAGT) | 20 (C8) | KKH-SaBE3 | |
| Q584 | TAG | − | GGUCAGCCCAACCAGUGCGU | (GGG) | 20 (C4) | SpBE3 | 1078-1085 |
| (CAG) | | | AGGUCAGCCCAACCAGUGCG | (TGG) | 20 (C5) | SpBE3 | |
| | | | GGCCACGAGGUCAGCCCAAC | (CAG) | 20 (C12) | SpBE3 | |
| | | | GCCACGAGGUCAGCCCAACC | (AGTG) | 20 (C11) | VQR-SpBE3 | |
| | | | CACGAGGUCAGCCCAACCAG | (TGCG) | 20 (C9) | VRER-SpBE3 | |
| | | | CGAGGUCAGCCCAACCAGUG | (CGTG) | 20 (C7) | VQR-SpBE3 | |
| | | | AGGUCAGCCCAACCAGUGCG | (TGG) | 20 (C5) | SpBE3 | |
| | | | GGUCAGCCCAACCAGUGCGU | (GGG) | 20 (C4/13) | SpBE3 | |
| Q587 | TAG | − | CCCAACCAGUGCGUGGGCCA | (CAG) | 20 (C7) | SpBE3 | 1086-1092 |
| (CAG) | | | CCAGUGCGUGGGCCACAGGG | (AGG) | 20 (C2) | SpBE3 | |
| | | | ACCAGUGCGUGGGCCACAGG | (GAG) | 20 (C3) | SpBE3 | |
| | | | AACCAGUGCGUGGGCCACAG | (GGAG) | 20 (C4) | EQR-SpBE3 | |
| | | | CAACCAGUGCGUGGGCCACA | (GGG) | 20 (C5) | SpBE3 | |
| | | | CCAACCAGUGCGUGGGCCAC | (AGG) | 20 (C6) | SpBE3 | |
| | | | CAACCAGUGCGUGGGCCACA | (GGGAG) | 20 (C5) | St3BE3 | |
| Q619 | TAG | ++ with | CAGGAGCAGGUGAAGAGGCC | (CGTG) | 20 (C1) | VQR-SpBE3 | 1093-1098 |
| (CAG) | | P168S | CCCCUCAGGAGCAGGUGAAG | (AGG) | 20 (C6) | SpBE3 | |
| | | | GCCCCUCAGGAGCAGGUGAA | (GAG) | 20 (C7) | SpBE3 | |
| | | | GGCCCCUCAGGAGCAGGUGA | (AGAG) | 20 (C8) | EQR-SpBE3 | |
| | | | CGGCCCCUCAGGAGCAGGUG | (AAG) | 20 (C9) | SpBE3 | |
| | | | CCCGGCCCCUCAGGAGCAGG | (TGAA) | 20 (C11) | VQR-SpBE3 | |
| Q621 | TAG | ++ | GGCCCCUCAGGAGCAGGUGA | (AGAG) | 20 (C14) | EQR-SpBE3 | 1099-1106 |
| (CAG) | | | GCCCCUCAGGAGCAGGUGAA | (GAG) | 20 (C13) | SpBE3 | |
| | | | CCCCUCAGGAGCAGGUGAAG | (AGG) | 20 (C12) | SpBE3 | |
| | | | CAGGAGCAGGUGAAGAGGCC | (CGTG) | 20 (C7) | VQR-SpBE3 | |
| | | | GGAGCAGGUGAAGAGGCCCG | (TGAG) | 20 (C5) | EQR-SpBE3 | |
| | | | GAGCAGGUGAAGAGGCCCGU | (GAG) | 20 (C4) | SpBE3 | |
| | | | AGCAGGUGAAGAGGCCCGUG | (AGG) | 20 (C3) | SpBE3 | |
| | | | CAGGUGAAGAGGCCCGUGAG | (CCGGGT) | 21 (C−1) | SaBE3 | |
| | | | G | | | | |
| W630 | TGA | + | CCAGCCCUCCUCGCAGGCCA | (CGG) | 20 (C1/2) | SpBE3 | 1107-1110 |
| (TGG) | | | CAGGGUCCAGCCCUCCUCGC | (AGG) | 20 (C7/8) | SpBE3 | |
| | | | UCAGGGUCCAGCCCUCCUCG | (CAG) | 20 (C8/9) | SpBE3 | |
| | | | GUCCAGCCCUCCUCGCAGGC | (CACGGT) | 20 (C3/4) | KKH-SaBE3 | |
| Q686 | TAG | − | GGCACCUGGCGCAGGCCUCC | (CAG) | 20 (C12) | SpBE3 | 1111-1119 |
| (CAG) | | | GCACCUGGCGCAGGCCUCCC | (AGG) | 20 (C11) | SpBE3 | |
| | | | CACCUGGCGCAGGCCUCCCA | (GGAG) | 20 (C10) | EQR-SpBE3 | |
| | | | ACCUGGCGCAGGCCUCCCAG | (GAG) | 20 (C9) | SpBE3 | |
| | | | CGCAGGCCUCCCAGGAGCUC | (CAG) | 20 (C3) | SpBE3 | |
| | | | GCAGGCCUCCCAGGAGCUCC | (AGTG) | 20 (C2) | VQR-SpBE3 | |
| | | | CAGGCCUCCCAGGAGCUCCAG | (TGAC) | 21 (C−1) | VQR-SpBE3 | |
| | | | GGCGCAGGCCUCCCAGGAGC | (TCCAGT) | 20 (C5) | SaBE3 | |
| | | | GCACCUGGCGCAGGCCUCC | (CAGGAG) | 19 (C11) | St3BE3 | |
| Q689 | TAG | − | CCUCCCAGGAGCUCCAGUGA | (CAG) | 20 (C6) | SpBE3 | 1120-1123 |
| (CAG) | | | AGGCCUCCCAGGAGCUCCAG | (TGAC) | 20 (C9) | VQR-SpBE3 | |
| | | | GCAGGCCUCCCAGGAGCUCC | (AGTG) | 20 (C11) | VQR-SpBE3 | |
| | | | CGCAGGCCUCCCAGGAGCUC | (CAG) | 20 (C12) | SpBE3 | |

*Residues found in loop/linker regions are labeled + or ++ Guide sequences (the portion of the guide RNA that targets the nucleobase editor to the target sequence) are provided, which may be used with any tracrRNA framework sequences provided herein to generate the full guide RNA sequence
^{a}BE types: SpBE3 = APOBEC1-SpCas9n-UGI; VQR-SpBE3 = APOBEC1-VQR-SpCas9n-UGI; EQR-SpBE3 = APOBEC1-EQR-SpCas9n-UGI; VRER-SpBE3 = APOBEC1-VRER-SpCas9n-UGI; SaBE3 = APOBEC1-SaCas9n-UGI; KKH-SaBE3 = APOBEC1-KKH-SaCas9n-UGI; St3BE3 = APOBEC1-St3Cas9n-UGI; St1BE3 = APOBEC1-St1Cas9n-UGI.

### Target Base in Non-Coding Region of PCSK9 Gene-Splicing Variants

[0144] Some aspects of the present disclosure provide strategies of reducing cellular PCSK9 activity via preventing PCSK9 mRNA maturation and production. In some embodiments, such strategies involve alterations of splicing sites in the PCSK9 gene. Altered splicing site may lead to altered splicing and maturation of the PCSK9 mRNA. For example, in some embodiments, an altered splicing site may lead to the skipping of an exon, in turn leading to a truncated protein product or an altered reading frame. In some embodiments, an altered splicing site may lead to translation of an intron sequence and premature translation termination when an in frame stop codon is encountered by the translating ribosome in the intron. In some embodiments, a start codon is edited and protein translation initiates at the next ATG codon, which may not be in the correct coding frame.

[0145] The splicing sites typically comprises an intron donor site, a Lariat branch point, and an intron acceptor site. The mechanism of splicing are familiar to those skilled in the art. As illustrated in FIG. 3, the intron donor site has a consensus sequence of GGGTRAGT, and the C bases paired with the G bases in the intron donor site consensus sequence may be targeted by a nucleobase editors described herein, thereby altering the intron donor site. The Lariat branch point also has consensus sequences, e.g., YTRAC, wherein Y is a pyrimidine and R is a purine. The C base in the Lariat branch point consensus sequence may be targeted by the nucleobase editors described herein, leading to the skipping of the following exon. The intron acceptor site has a consensus sequence of YNCAGG, wherein Y is a pyrimidine and N is any nucleotide. The C base of the consensus sequence of the intron acceptor site, and the C base paired with the G bases in the consensus sequence of the intron acceptor site may be targeted by the nucleobase editors described herein, thereby altering the intron acceptor site, in turn leading the skipping of an exon. General strategies of altering the splicing sites of the PCSK9 gene are described in Table 7.

TABLE 7
Exemplary Alteration of Intron-Exon Junction via Base Editing

| Target | Consensus | Base-editing | Edited | |
|---|---|---|---|---|
| site | Sequence | reaction (s) | sequence | Outcome |
| Intron | GGGTRAGT | 2^{nd} or 3^{rd} base | GAGTRAGT | Intron sequence is translated |
| donor | (example) | C to T on | (example) | as exon, in frame premature |
| | | complementary | | STOP codon |
| | | strand | | |
| Lariat | YTRAC | 5^{th} base C to T | YTRAT | The following exon is |
| branch | (example) | on coding | (example) | skipped from the mature |
| point | | strand | | mRNA, which may affect the |
| | | | | coding frame |
| Intron | Y(rich)NCAGG | 2^{nd} to last base | Y(rich)NCAAG | The exon is skipped from the |
| acceptor | (example) | C to T on | (example) | mature mRNA, which may |
| | | complementary | | affect the coding frame |
| | | strand | | |
| Start | ATG (Met/M) | 3^{rd} base C to T | ATA (Ile/I) | The next ATG is used as |
| codon | | on | | start codon, which may |
| | | complementary | | affect the coding frame |
| | | strand | | |

[0146] As described herein, gene sequence for human PCSK9 (SEQ ID NO: 1990) is ˜22-kb long and contains 12 exons and 11 introns. Each of the exon-intron junction may be altered to disrupt the processing and maturation of the PCSK9 mRNA. Thus, provided in Table 8 are non-limiting examples of alterations that may be made in the PCSK9 gene using the nucleobase editors described herein, and the guide sequences that may be used for each alteration.

TABLE 8
Alteration of Intron/Exon Junctions in PCSK9 Gene via Base Editing

| Target | Stop | Predicted | | | gRNA size | | SEQ |
|---|---|---|---|---|---|---|---|
| codon | codon | truncation* | guide sequence | (PAM) | (C edited) | BE type^{a} | ID NO |
| W10 | TAG or | ++ | CCAGGACCGCCUGGAGCUGAC | (GGTG) | 21 (C−1) | VQR-SpBE3 | 1124-1132 |
| (TGG) | TGA | | CCAGGACCGCCUGGAGCUGA | (CGG) | 20 (C1) | SpBE3 | |
| and/or | | | CCACCAGGACCGCCUGGAGC | (TGAC) | 20 (C4,5,1,2) | VQR-SpBE3 | |
| W11 | | | GCGGCCACCAGGACCGCCUG | (GAG) | 20 (C8,9,5,6) | SpBE3 | |
| (TGG) | | | AGCGGCCACCAGGACCGCCU | (GGAG) | 20 (C9,10,6,7) | EQR-SpBE3 | |
| | | | CAGCGGCCACCAGGACCGCC | (TGG) | 20 (C10,11,7,8) | SpBE3 | |
| | | | CACCAGGACCGCCUGGAGCU | (GACGGT) | 20 (C3,4,1) | KKH-SaBE3 | |
| | | | CCAGGACCGCCUGGAGCUGA | (CGGTG) | 20 (C−1) | St3BE3 | |
| | | | CAGCGGCCACCAGGACCGCC | (TGGAG) | 20 (C10,11,7,8) | St3BE3 | |
| Q31 | TAG | + | GGCGCCCGUGCGCAGGAGGA | (CGAG) | 20 (C13) | EQR-SpBE3 | 1133-1140 |
| (CAG) | | | GCGCCCGUGCGCAGGAGGAC | (GAG) | 20 (C12) | SpBE3 | |
| | | | CGCCCGUGCGCAGGAGGACG | (AGG) | 20 (C11) | SpBE3 | |
| | | | GCCCGUGCGCAGGAGGACGA | (GGAC) | 20 (C10) | VQR-SpBE3 | |
| | | | CGUGCGCAGGAGGACGAGGA | (CGG) | 20 (C7) | SpBE3 | |
| | | | GUGCGCAGGAGGACGAGGAC | (GGCG) | 20 (C6) | VRER-SpBE3 | |
| | | | GCGCAGGAGGACGAGGACGG | (CGAC) | 20 (C4) | VQR-SpBE3 | |
| | | | CGUGCGCAGGAGGACGAGGA | (CGGCG) | 20 (C7) | St3BE3 | |
| W77 | TAG or | + | CAGGCAACCUCCACGGAUCC | (TGG) | 20 (C11/12) | SpBE3 | 1141 |
| (TGG) | TGA | | | | | | |
| Q90 | TAG | + | GACCCACCUCUCGCAGUCAG | (AGCG) | 20 (C14*) | VRER-SpBE3 | 1142 |
| (CAG) | | | | | | | |
| Q99 | TAG | ++ with | UGCAGGCCCAGGCUGCCCGC | (CGG) | 20 (C3/9) | SpBE3 | 1143-1147 |
| (CAG) | | Q101X | GCAGGCCCAGGCUGCCCGCC | (GGG) | 20 (C2/8) | SpBE3 | |
| and/or | | | CAGGCCCAGGCUGCCCGCCG | (GGG) | 20 (C1/7) | SpBE3 | |
| Q101 | | | GCAGGCCCAGGCUGCCCGCC | (GGGGAT) | 20 (C2/8) | SaBE3 | |
| (CAG) | | | UGCAGGCCCAGGCUGCCCGC | (CGGGG) | 20 (C3/9) | St3BE3 | |
| Q101 | TAG | ++ with | AGGCCCAGGCUGCCCGCCGG | (GGAT) | 20 (C6) | EQR-SpBE3 | 1148 |
| (CAG) | | Q99X | | | | | |
| Q152 | TAG | ++ | UGUCUUUGCCCAGAGCAUCC | (CGTG) | 20 (C10) | VQR-SpBE3 | 1149-1153 |
| (CAG) | | | UCUUUGCCCAGAGCAUCCCG | (TGG) | 20 (C9) | SpBE3 | |
| | | | CUUUGCCCAGAGCAUCCCGU | (GGAA) | 20 (C7) | VQR-SpBE3 | |
| | | | CCAGAGCAUCCCGUGGAACC | (TGG) | 20 (C1) | SpBE3 | |
| | | | CCAGAGCAUCCCGUGGAACC | (TGGAG) | 20 (C1) | St3BE3 | |
| W156 | TAG or | + | CCACGGGAUGCUCUGGGCAA | (AGAC) | 20 (C1/2) | VQR-SpBE3 | 1154-1158 |
| (TGG) | TGA | | UCCACGGGAUGCUCUGGGCA | (AAG) | 20 (C2/3) | SpBE3 | |
| | | | CCAGGUUCCACGGGAUGCUC | (TGGG) | 20 (C8/9) | VQR-SpBE3 | |
| | | | CAGGUUCCACGGGAUGCUCU | (GGG) | 20 (C7/8) | SpBE3 | |
| | | | CCAGGUUCCACGGGAUGCUC | (TGG) | 20 (C8/9) | SpBE3 | |
| Q172 | TAG | ++ | GCGGAUGAAUACCAGCCCCC | (CGG) | 20 (C13) | SpBE3 | 1159-1161 |
| (CAG) | | | AUGAAUACCAGCCCCCCGGU | (AAG) | 20 (C9) | SpBE3 | |
| | | | UGAAUACCAGCCCCCCGGUA | (AGAC) | 20 (C8) | VQR-SpBE3 | |
| Q190 | TAG | ++ | CCAGCAUACAGAGUGACCAC | (CGG) | 20 (C9) | SpBE3 | 1162-1167 |
| (CAG) | | | CAGCAUACAGAGUGACCACC | (GGG) | 20 (C8) | SpBE3 | |
| | | | CCAGCAUACAGAGUGACCAC | (CGGG) | 20 (C7) | VQR-SpBE3 | |
| | | | AGCAUACAGAGUGACCACCG | (GGAA) | 20 (C7) | VQR-SpBE3 | |
| | | | CAGAGUGACCACCGGGAAAU | (CGAG) | 20 (C1) | EQR-SpBE3 | |
| | | | AGCAUACAGAGUGACCACCG | (GGAAAT) | 20 (C7) | KKH-SaBE3 | |
| Q219 | TAG | ++ | CUUCCACAGACAGGUAAGCA | (CGG) | 20 (C11) | SpBE3 | 1168-1170 |
| (CAG) | | | GACAGGUAAGCACGGCCGUC | (TGAT) | 20 (C3) | VQR-SpBE3 | |
| | | | CAGACAGGUAAGCACGGCCG | (TCTGAT) | 20 (C5) | KKH-SaBE3 | |
| Q256 | TAA | − | CGUGCUCAACUGCCAAGGGA | (AGG) | 20 (C14) | SpBE3 | 1171-1178 |
| (CAA) | | | GUGCUCAACUGCCAAGGGAA | (GGG) | 20 (C13) | SpBE3 | |
| | | | CGUGCUCAACUGCCAAGGGA | (AGGG) | 20 (C13) | VQR-SpBE3 | |
| | | | CAACUGCCAAGGGAAGGGCA | (CGG) | 20 (C8) | SpBE3 | |
| | | | UGCCAAGGGAAGGGCACGGU | (TAG) | 20 (C4) | SpBE3 | |
| | | | GCCAAGGGAAGGGCACGGUU | (AGCG) | 20 (C3) | VRER-SpBE3 | |
| | | | CAAGGGAAGGGCACGGUUAG | (CGG) | 20 (C1) | SpBE3 | |
| | | | CUCAACUGCCAAGGGAAGGG | (CACGGT) | 20 (C10) | KKH-SaBE3 | |
| Q275 | TAG | − | UUCGGAAAAGCCAGCUGGUC | (CAG) | 20 (C12) | SpBE3 | 1179-1182 |
| (CAG) | | | AAAAGCCAGCUGGUCCAGCC | (TGTG) | 20 (C7) | VQR-SpBE3 | |
| | | | AAGCCAGCUGGUCCAGCCUG | (TGG) | 20 (C5) | SpBE3 | |
| | | | AAGCCAGCUGGUCCAGCCUG | (TGGGG) | 20 (C5) | St3BE3 | |
| Q278 | TAG | + | AAGCCAGCUGGUCCAGCCUG | (TGG) | 20 (C14) | SpBE3 | 1183-1194 |
| (CAG) | | | AGCCAGCUGGUCCAGCCUGU | (GGG) | 20 (C13/4) | SpBE3 | |
| and/or | | | GCCAGCUGGUCCAGCCUGUG | (GGG) | 20 (C12/3) | SpBE3 | |
| Q275 | | | AGCCAGCUGGUCCAGCCUGU | (GGGG) | 20 (C13/4) | SpBE3 | |
| (CAG) | | | GGUCCAGCCUGUGGGGCCAC | (TGG) | 20 (C5) | SpBE3 | |
| | | | GUCCAGCCUGUGGGGCCACU | (GGTG) | 20 (C4) | VQR-SpBE3 | |
| | | | CCAGCCUGUGGGGCCACUGG | (TGG) | 20 (C2) | SpBE3 | |
| | | | CAGCCUGUGGGGCCACUGGU | (GGTG) | 20 (C1) | VQR-SpBE3 | |
| | | | CUGGUCCAGCCUGUGGGGCC | (ACTGGT) | 20 (C7) | KKH-SaBE3 | |
| | | | GUCCAGCCUGUGGGGCCACU | (GGTGGT) | 20 (C4) | KKH-SaBE3 | |
| | | | GGUCCAGCCUGUGGGGCCAC | (TGGTG) | 20 (C5) | St3BE3 | |
| | | | CCAGCCUGUGGGGCCACUGG | (TGGTG) | 20 (C2) | St3BE3 | |
| Q302 | TAG | − | CAACGCCGCCUGCCAGCGCC | (TGG) | 20 (C14) | SpBE3 | 1195-1205 |
| (CAG) | | | AACGCCGCCUGCCAGCGCCU | (GGCG) | 20 (C13) | VRER-SpBE3 | |
| | | | CGCCGCCUGCCAGCGCCUGG | (CGAG) | 20 (C11) | EQR-SpBE3 | |
| | | | GCCGCCUGCCAGCGCCUGGC | (GAG) | 20 (C10) | SpBE3 | |
| | | | CCGCCUGCCAGCGCCUGGCG | (AGG) | 20 (C9) | SpBE3 | |
| | | | CGCCUGCCAGCGCCUGGCGA | (GGG) | 20 (C8) | SpBE3 | |
| | | | UGCCAGCGCCUGGCGAGGGC | (TGG) | 20 (C4) | SpBE3 | |
| | | | GCCAGCGCCUGGCGAGGGCU | (GGG) | 20 (C3) | SpBE3 | |
| | | | CCAGCGCCUGGCGAGGGCUG | (GGG) | 20 (C2) | SpBE3 | |
| | | | UGCCAGCGCCUGGCGAGGGC | (TGGGGT) | 20 (C4) | SaBE3 | |
| | | | UGCCAGCGCCUGGCGAGGGC | (TGGGG) | 20 (C4) | St3BE3 | |
| Q342 | TAA | ++ with | CACCAAUGCCCAAGACCAGC | (CGG) | 20 (C11) | SpBE3 | 1206-1214 |
| (CAA) | and/or | Q344X | ACCAAUGCCCAAGACCAGCC | (GGTG) | 20 (C10) | VQR-SpBE3 | |
| and/or | TAG | | CAAUGCCCAAGACCAGCCGG | (TGAC) | 20 (C8) | VQR-SpBE3 | |
| Q344 | | | CCAAGACCAGCCGGUGACCC | (TGG) | 20 (C2/8) | SpBE3 | |
| (CAG) | | | CAAGACCAGCCGGUGACCCU | (GGG) | 20 (C1/7) | SpBE3 | |
| | | | CAAGACCAGCCGGUGACCCUG | (GGG) | 21 (C−1/6) | SpBE3 | |
| | | | GCCACCAAUGCCCAAGACCA | (GCCGGT) | 20 (C13) | KKH-SaBE3 | |
| | | | CACCAAUGCCCAAGACCAGC | (CGGTG) | 20 (C11) | St3BE3 | |
| | | | CCAAGACCAGCCGGUGACCC | (TGGGG) | 20 (C2/8) | St3BE3 | |
| Q344 | TAG | ++ with | AGACCAGCCGGUGACCCUGG | (GGAC) | 20 (C5) | VQR-SpBE3 | 1215 |
| (CAG) | | Q342X | | | | | |
| Q382 | TAG | − | CUGCUUUGUGUCACAGAGUG | (GGAC) | 20 (C14) | VQR-SpBE3 | 1216-1218 |
| (CAG) | | | UGUCACAGAGUGGGACAUCA | (CAG) | 20 (C6) | SpBE3 | |
| | | | GUCACAGAGUGGGACAUCAC | (AGG) | 20 (C5) | SpBE3 | |
| Q387 | TAG | − | ACAUCACAGGCUGCUGCCCA | (CGTG) | 20 (C7) | VQR-SpBE3 | 1219-1222 |
| (CAG) | | | AUCACAGGCUGCUGCCCACG | (TGG) | 20 (C5) | SpBE3 | |
| | | | CAGGCUGCUGCCCACGUGGC | (TGG) | 20 (C1) | SpBE3 | |
| | | | CACAGGCUGCUGCCCACGUG | (GCTGGT) | 20 (C3) | KKH-SaBE3 | |
| Q413 | TAG | | GGCCGAGUUGAGGCAGAGAC | (TGAT) | 20 (C14) | VQR-SpBE3 | 1223 |
| (CAG) | | | | | | | |
| W428 | TAG or | | AGGGAACCAGGCCUCAUUGA | (TGAC) | 20 (C7/8) | VQR-SpBE3 | 1224-1226 |
| (TGG) | TGA | | CUCAGGGAACCAGGCCUCAU | (TGAT) | 20 (C10/11) | VQR-SpBE3 | |
| | | | UCCUCAGGGAACCAGGCCUC | (ATTGAT) | 20 (C11/12) | KKH-SaBE3 | |
| Q433 | TAG | | CCCUGAGGACCAGCGGGUAC | (TGAC) | 20 (C11) | VQR-SpBE3 | 1227, 1228 |
| (CAG) | | | CAGCGGGUACUGACCCCCAA | (CCTGGT) | 20 (C1) | KKH-SaBE3 | |
| W453 | TAG or | ++ | CAGCUGCCAACCUGCAAAAA | (GGG) | 20 (C8/9) | SpBE3 | 1229-1235 |
| (TGG) | TGA | | GCCAACCUGCAAAAAGGGCC | (TGGG) | 20 (C2/3) | VQR-SpBE3 | |
| | | | GCCAACCUGCAAAAAGGGCC | (TGG) | 20 (C2/3) | SpBE3 | |
| | | | ACAGCUGCCAACCUGCAAAA | (AGGG) | 20 (C8/9) | VQR-SpBE3 | |
| | | | ACAGCUGCCAACCUGCAAAA | (AGG) | 20 (C8/9) | SpBE3 | |
| | | | AACAGCUGCCAACCUGCAAA | (AAG) | 20 (C9/10) | SpBE3 | |
| | | | GCCAACCUGCAAAAAGGGCC | (TGGGAT) | 20 (C2/3) | SaBE3 | |
| Q454 | TAG | ++ | GCAGGUUGGCAGCUGUUUUG | (CAG) | 20 (C10) | SpBE3 | 1236-1239 |
| (CAG) | | | CAGGUUGGCAGCUGUUUUGC | (AGG) | 20 (C9) | SpBE3 | |
| | | | AGGUUGGCAGCUGUUUUGCA | (GGAC) | 20 (C8) | VQR-SpBE3 | |
| | | | GCAGCUGUUUUGCAGGACUG | (TATGGT) | 20 (C2) | KKH-SaBE3 | |
| W461 | TAG or | − | GACCAUACAGUCCUGCAAAA | (CAG) | 20 (C3/4) | SpBE3 | 1240 |
| (TGG) | TGA | | | | | | |
| Q503 | TAG | + | UAAGGCCCAAGGGGGCAAGC | (TGG) | 20 (C8) | SpBE3 | 1241-1243 |
| (CAA) | | | ACUCUAAGGCCCAAGGGGGC | (AAG) | 20 (C12) | SpBE3 | |
| | | | UCUAAGGCCCAAGGGGGCAA | (GCTGGT) | 20 (C10) | KKH-SaBE3 | |
| Q531 | TAG | ++ with | CUGCUACCCCAGGCCAACUG | (CAG) | 20 (C10) | SpBE3 | 1244-1246 |
| (CAG) | | P530S | UGCUACCCCAGGCCAACUGC | (AGCG) | 20 (C9) | VQR-SpBE3 | |
| | | | CAGGCCAACUGCAGCGUCCACA | (CAG) | 22 (C−2) | SpBE3 | |
| Q554 | TAG | ++ with | CCAACAGGGCCACGUCCUCA | (CAG) | 20 (C2/5) | SpBE3 | 1247-1251 |
| (CAA) | and/or | Q555X | CAACAGGGCCACGUCCUCAC | (AGG) | 20 (C1/4) | SpBE3 | |
| and/or | TAA | | CAGGGCCACGUCCUCACAGG | (TAG) | 20 (C1) | SpBE3 | |
| Q555 | | | CAGGGCCACGUCCUCACAGGU | (AGG) | 21 (C−1) | SpBE3 | |
| (CAG) | | | ACCAACAGGGCCACGUCCUC | (ACAGGT) | 20 (C3/6) | KKH-SaBE3 | |
| W566 | TAG or | ++ | CCCAGUGGGAGCUGCAGCCU | (GGGG) | 20 (C2/3) | VQR-SpBE3 | 1252-1258 |
| (TGG) | TGA | | CCAGUGGGAGCUGCAGCCUG | (GGG) | 20 (C1/2) | SpBE3 | |
| | | | UCCCAGUGGGAGCUGCAGCC | (TGGG) | 20 (C3/4) | VQR-SpBE3 | |
| | | | CCCAGUGGGAGCUGCAGCCU | (GGG) | 20 (C2/3) | SpBE3 | |
| | | | UCCCAGUGGGAGCUGCAGCC | (TGG) | 20 (C3/4) | SpBE3 | |
| | | | CCACCUCCCAGUGGGAGCUG | (CAG) | 20 (C7/8) | SpBE3 | |
| | | | UCCCAGUGGGAGCUGCAGCC | (TGGGG) | 20 (C4/5) | St3BE3 | |
| R582 | TGA | ++ with | GGCCACGAGGUCAGCCCAAC | (CAG) | 20 (C12/6) | SpBE3 | 1259-1263 |
| (CGA) | and/or | P581S/L | GCCACGAGGUCAGCCCAACC | (AGTG) | 20 (C11/5) | VQR-SpBE3 | |
| and/or | TAG | | CACGAGGUCAGCCCAACCAG | (TGCG) | 20 (C9/3) | VRER-SpBE3 | |
| Q584 | | | CGAGGUCAGCCCAACCAGUG | (CGTG) | 20 (C6/1) | VQR-SpBE3 | |
| (CAG) | | | GAGGCCACGAGGUCAGCCCA | (ACCAGT) | 20 (C8) | KKH-SaBE3 | |
| Q584 | TAG | − | GGUCAGCCCAACCAGUGCGU | (GGG) | 20 (C4) | SpBE3 | 1264-1271 |
| (CAG) | | | AGGUCAGCCCAACCAGUGCG | (TGG) | 20 (C5) | SpBE3 | |
| | | | GGCCACGAGGUCAGCCCAAC | (CAG) | 20 (C12) | SpBE3 | |
| | | | GCCACGAGGUCAGCCCAACC | (AGTG) | 20 (C11) | VQR-SpBE3 | |
| | | | CACGAGGUCAGCCCAACCAG | (TGCG) | 20 (C9) | VRER-SpBE3 | |
| | | | CGAGGUCAGCCCAACCAGUG | (CGTG) | 20 (C7) | VQR-SpBE3 | |
| | | | AGGUCAGCCCAACCAGUGCG | (TGG) | 20 (C5) | SpBE3 | |
| | | | GGUCAGCCCAACCAGUGCGU | (GGG) | 20 (C4/13) | SpBE3 | |
| Q587 | TAG | − | CCCAACCAGUGCGUGGGCCA | (CAG) | 20 (C7) | SpBE3 | 1272-1278 |
| (CAG) | | | CCAGUGCGUGGGCCACAGGG | (AGG) | 20 (C2) | SpBE3 | |
| | | | ACCAGUGCGUGGGCCACAGG | (GAG) | 20 (C3) | SpBE3 | |
| | | | AACCAGUGCGUGGGCCACAG | (GGAG) | 20 (C4) | EQR-SpBE3 | |
| | | | CAACCAGUGCGUGGGCCACA | (GGG) | 20 (C5) | SpBE3 | |
| | | | CCAACCAGUGCGUGGGCCAC | (AGG) | 20 (C6) | SpBE3 | |
| | | | CAACCAGUGCGUGGGCCACA | (GGGAG) | 20 (C5) | St3BE3 | |
| Q619 | TAG | ++ with | CAGGAGCAGGUGAAGAGGCC | (CGTG) | 20 (C1) | VQR-SpBE3 | 1279-1284 |
| (CAG) | | P618S | CCCCUCAGGAGCAGGUGAAG | (AGG) | 20 (C6) | SpBE3 | |
| | | | GCCCCUCAGGAGCAGGUGAA | (GAG) | 20 (C7) | SpBE3 | |
| | | | GGCCCCUCAGGAGCAGGUGA | (AGAG) | 20 (C8) | EQR-SpBE3 | |
| | | | CGGCCCCUCAGGAGCAGGUG | (AAG) | 20 (C9) | SpBE3 | |
| | | | CCCGGCCCCUCAGGAGCAGG | (TGAA) | 20 (C11) | VQR-SpBE3 | |
| Q621 | TAG | ++ | GGCCCCUCAGGAGCAGGUGA | (AGAG) | 20 (C14) | EQR-SpBE3 | 1285-1292 |
| (CAG) | | | GCCCCUCAGGAGCAGGUGAA | (GAG) | 20 (C13) | SpBE3 | |
| | | | CCCCUCAGGAGCAGGUGAAG | (AGG) | 20 (C12) | SpBE3 | |
| | | | CAGGAGCAGGUGAAGAGGCC | (CGTG) | 20 (C7) | VQR-SpBE3 | |
| | | | GGAGCAGGUGAAGAGGCCCG | (TGAG) | 20 (C5) | EQR-SpBE3 | |
| | | | GAGCAGGUGAAGAGGCCCGU | (GAG) | 20 (C4) | SpBE3 | |
| | | | AGCAGGUGAAGAGGCCCGUG | (AGG) | 20 (C3) | SpBE3 | |
| | | | CAGGUGAAGAGGCCCGUGAGG | (CCGGGT) | 21 (C−1) | SaBE3 | |
| W630 | TGA | + | CCAGCCCUCCUCGCAGGCCA | (CGG) | 20 (C1/2) | SpBE3 | 1293-1296 |
| (TGG) | | | CAGGGUCCAGCCCUCCUCGC | (AGG) | 20 (C7/8) | SpBE3 | |
| | | | UCAGGGUCCAGCCCUCCUCG | (CAG) | 20 (C8/9) | SpBE3 | |
| | | | GUCCAGCCCUCCUCGCAGGC | (CACGGT) | 20 (C3/4) | KKH-SaBE3 | |
| Q686 | TAG | − | GGCACCUGGCGCAGGCCUCC | (CAG) | 20 (C12) | SpBE3 | 1297-1305 |
| (CAG) | | | GCACCUGGCGCAGGCCUCCC | (AGG) | 20 (C11) | SpBE3 | |
| | | | CACCUGGCGCAGGCCUCCCA | (GGAG) | 20 (C10) | EQR-SpBE3 | |
| | | | ACCUGGCGCAGGCCUCCCAG | (GAG) | 20 (C9) | SpBE3 | |
| | | | CGCAGGCCUCCCAGGAGCUC | (CAG) | 20 (C3) | SpBE3 | |
| | | | GCAGGCCUCCCAGGAGCUCC | (AGTG) | 20 (C2) | VQR-SpBE3 | |
| | | | CAGGCCUCCCAGGAGCUCCAG | (TGAC) | 21 (C−1) | VQR-SpBE3 | |
| | | | GGCGCAGGCCUCCCAGGAGC | (TCCAGT) | 20 (C5) | SaBE3 | |
| | | | GCACCUGGCGCAGGCCUCC | (CAGGAG) | 19 (C11) | St3BE3 | |
| Q689 | TAG | − | CCUCCCAGGAGCUCCAGUGA | (CAG) | 20 (C6) | SpBE3 | 1306-1309 |
| (CAG) | | | AGGCCUCCCAGGAGCUCCAG | (TGAC) | 20 (C9) | VQR-SpBE3 | |
| | | | GCAGGCCUCCCAGGAGCUCC | (AGTG) | 20 (C11) | VQR-SpBE3 | |
| | | | CGCAGGCCUCCCAGGAGCUC | (CAG) | 20 (C12) | SpBE3 | |

*Guide sequences (the portion of the guide RNA that targets the nucleobase editor to the target sequence) are provided, which may be used with any tracrRNA framework sequences provided herein to generate the full guide RNA sequence
^{a}BE types: SpBE3 = APOBEC1-SpCas9n-UGI; VQR-SpBE3 = APOBEC1-VQR-SpCas9n-UGI; EQR-SpBE3 = APOBEC1-EQR-SpCas9n-UGI; VRER-SpBE3 = APOBEC1-VRER-SpCas9n-UGI; SaBE3 = APOBEC1-SaCas9n-UGI; KKH-SaBE3 = APOBEC1-KKH-SaCas9n-UGI; St3BE3 = APOBEC1-St3Cas9n-UGI; St1BE3 = APOBEC1-St1Cas9n-UGI.

Scoring of Guide RNA Sequences for Efficient Base Editing with High Specificity and Low Off-Target Binding

[0147] To achieve efficient and specific genome modifications using base editing requires judicious selection of a genomic sequence containing a target C, for which a specific complementary guide RNA sequence can be generated, and if required, a nearby PAM that matches the DNA-binding domain that is fused to the cytidine deaminase (e.g. Cas9, dCas9, Cas9n, Cpf1, NgAgo, etc.), as described in Komor et al., Nature, 533, 420-424 (2016), which is incorporated herein by reference. The guide RNA sequence and PAM preference define the genomic target sequence(s) of programable DNA-binding domains (e.g. Cas9, dCas9, Cas9n, Cpf1, NgAgo, etc.). Because of the repetitive nature of some genomic sequences as well as the stochastic frequency of representation of short sequences throughout the genome it is necessary to identify guide RNAs for programming base editors that have the lowest number of potential off target sites, taking into consideration 1, 2, 3, 4 or more mismatches against all other sequences in the genome as described in Hsu et al (Nature biotechnology, 2013, 31(9):827-832), Fusi et al (bioRxiv 021568; doi: http://dx.doi.org/10.1101/021568), Chari et al (Nature Methods, 2015, 12(9):823-6), Doench et al (Nature Biotechnology, 2014, 32(12):1262-7), Wang et al (Science, 2014, 343(6166): 80-4), Moreno-Mateos et al (Nature Methods, 2015, 12(10):982-8), Housden et al (Science Signaling, 2015, 8(393):rs9), Haeussler et al, (Genome Biol. 2016; 17: 148), each of which is incorporated herein by reference, The potential for the formation of bulges between the guide RNA and the target DNA may also be considered as described in Bae et al (Bioinformatics, 2014, 30, 1473-5), which is incorporated herein by reference. Non-limiting examples of calculated specificity scores for selected guide RNAs from Tables 3-8 are shown in Tables 9-13. Other calculated parameters that may influence DNA-binding domains programming efficiency are shown, as described in Housden et al (Science Signaling, 2015, 8(393):rs9), Farboud et al (Genetics, 2015, 199(4):959-71), each of which is incorporated herein by reference.

TABLE 9
Efficiency and Specificity Scores for gRNAs for PCSK9 Protective Loss-of-Function Mutations
via Codon Change. Guide sequences correspond to SEQ ID NOs: 1310-1437 from top to bottom.

| | | | | gRNA | | | | | | | | | | |
|---|---|---|---|---|---|---|---|---|---|---|---|---|---|---|
| Target | | | | size | | | | | | | | | | |
| vari- | BE | guide | | (C | | | | | | | | | Prox/ | Off- |
| ants | type^{a} | sequence | PAM | edited) | Eff.^{b} | Hsu^{c} | Fusi | Chari | Doench | Wang | M.-M. | Housden | GC | targets^{d} |
| R194W | SaBE3 | GACCACCGGGA | (CAGG | 20 (C7) | 7.0 | 99 | — | 98 | 11 | 86 | 60 | 7 | +GG | 0-0-0- |
| | | AAUCGAGGG | GT) | | | | | | | | | | | 1-10 |
| H193Y | SaBE3 | GACCACCGGGA | (CAGG | 20 (C4) | 7.0 | 99 | — | 98 | 11 | 86 | 60 | 7 | +GG | 0-0-0- |
| | | AAUCGAGGG | GT) | | | | | | | | | | | 1-10 |
| R237R | VQR- | GUCAGCGGCCG | (CGTG) | 20 (C10) | 7.4 | 98 | — | 95 | 3 | 83 | 75 | 7 | +GG | 0-0-0- |
| | SpBE3 | GGAUGCCGG | | | | | | | | | | | | 1-18 |
| R194W | SpBE3 | GACCACCGGGA | (CAG) | 20 (C7) | 7.0 | 93 | 59 | 98 | 14 | 86 | 60 | 7 | +GG | 0-0-1- |
| | | AAUCGAGGG | | | | | | | | | | | | 4-41 |
| L253F | EQR- | GCGCGUGCUCA | (GGAA) | 20 (C8) | 9.1 | 90 | — | 97 | 83 | 77 | 74 | 9 | + | 0-0-0- |
| | SpBE3 | ACUGCCAAG | | | | | | | | | | | | 4-36 |
| A220V | VQR- | UCGUCGAGCA | (TGTG) | 20 (C13) | 4.5 | 100 | — | 87 | 16 | 67 | 54 | 4 | − | 0-0-0- |
| | SpBE3 | GGCCAGCAAG | | | | | | | | | | | | 0-2 |
| R46L | SpBE3 | GCUAGCCUUG | (AGG) | 20 (C11) | 6.4 | 90 | 63 | 94 | 21 | 81 | 80 | 6 | +GG | 0-0-2- |
| | | CGUUCCGAGG | | | | | | | | | | | | 0-35 |
| A68T | KKH- | CGCACCUUGGC | (GAAG | 20 (C11) | 5.1 | 98 | — | 85 | 2 | 48 | 53 | 5 | + | 0-0-0- |
| | SaBE3 | GCAGCGGUG | GT) | | | | | | | | | | | 0-10 |
| P616L | KKH- | GGAAUCCCGGC | (GCAG | 20 | 4.0 | 94 | — | 86 | 23 | 87 | 53 | 4 | − | 0-0-0- |
| | SaBE3 | CCCUCAGGA | GT) | (C6/7) | | | | | | | | | | 1-26 |
| R194W | SpBE3 | AGUGACCACCG | (GGG) | 20 (C10) | 7.3 | 92 | 65 | 88 | 66 | 80 | 54 | 7 | − | 0-0-0- |
| | | GGAAAUCGA | | | | | | | | | | | | 2-45 |
| H193Y | SpBE3 | AGUGACCACCG | (GGG) | 20 (C7) | 7.3 | 92 | 65 | 88 | 66 | 80 | 54 | 7 | − | 0-0-0- |
| | | GGAAAUCGA | | | | | | | | | | | | 2-45 |
| H193Y | SpBE3 | ACCACCGGGAA | (AGG) | 20 (C3) | 5.9 | 92 | 65 | 88 | 66 | 80 | 54 | 7 | − | 0-0-0- |
| | | AUCGAGGGC | | | | | | | | | | | | 2-45 |
| A443T | KKH- | GGGCGGCCACC | (GTCA | 20 (C4) | 6.4 | 90 | — | 88 | 14 | 90 | 77 | 6 | +GG | 0-0-0- |
| | SaBE3 | AGGUUGGGG | GT) | | | | | | | | | | | 4-36 |
| G263S | KKH- | CGCUAACCGUG | (GGCA | 21 (C−1) | 5.9 | 94 | 47 | 86 | 47 | 57 | 59 | 5 | − | 0-0-0- |
| | SaBE3 | CCCUUCCCUU | GT) | | | | | | | | | | | 2-20 |
| M1I | St3BE3 | ACGGUGCCCAU | (GGGA | 20 (C9) | 5.1 | 87 | 59 | 81 | 10 | 77 | 92 | 5 | + | 0-0-2- |
| | | GAGGGCCAG | G) | | | | | | | | | | | 3-29 |
| A220T | VQR- | GGCCUGCUCGA | (GGAC) | 20 (C3) | 4.5 | 90 | — | 86 | 88 | 79 | 57 | 4 | − | 0-0-0- |
| | SpBE3 | CGAACACAA | | | | | | | | | | | | 3-43 |
| R46L | SpBE3 | UGCUAGCCUU | (GAG) | 20 (C12) | 6.6 | 97 | 64 | 81 | 56 | 63 | 44 | 6 | + | 0-0-0- |
| | | GCGUUCCGAG | | | | | | | | | | | | 2-26 |
| A68T | VQR- | CCGCACCUUGG | (GGAA) | 20 (C12) | 5.2 | 93 | — | 39 | 4 | 45 | 85 | 5 | + | 0-0-0- |
| | SpBE3 | CGCAGCGGU | | | | | | | | | | | | 5-28 |
| A68T | St3BE3 | CACCUUGGCGC | (AGGT | 20 (C9) | 4.9 | 95 | 46 | 83 | 2 | 33 | 57 | 4 | + | 0-0-0- |
| | | AGCGGUGGA | G) | | | | | | | | | | | 2-33 |
| H226 | St3BE3 | UCAUGGCACCC | (GGGT | 20 (C2) | 6.0 | 84 | 58 | 93 | 38 | 80 | 61 | 6 | + | 0-0-0- |
| | | ACCUGGCAG | G) | | | | | | | | | | | 6-60 |
| R237R | St3BE3 | CGGGAUGCCGG | (GGGT | 20 (C1) | 7.6 | 91 | 41 | 60 | 10 | 62 | 85 | 7 | + | 0-0-0- |
| | | CGUGGCCAA | G) | | | | | | | | | | | 3-15 |
| R237Q | St3BE3 | CGGGAUGCCGG | (GGGT | 20 (C1) | 7.6 | 91 | 41 | 60 | 10 | 62 | 85 | 7 | + | 0-0-0- |
| | | CGUGGCCAA | G) | | | | | | | | | | | 3-15 |
| S386 | KKH- | CACAGGCUGCU | (GCTG | 20 (C1) | 7.7 | 95 | — | 81 | 4 | 56 | 73 | 7 | + | 0-0-0- |
| | SaBE3 | GCCCACGUG | GT) | | | | | | | | | | | 3-23 |
| H226 | SaBE3 | AGUCAUGGCA | (AGGG | 20 (C4) | 4.9 | 91 | 49 | 85 | 4 | 49 | 50 | 4 | + | 0-0-0- |
| | | CCCACCUGGC | GT) | | | | | | | | | | | 0-31 |
| A220T | VQR- | ACACUUGCUG | (CGAA) | 20 (C12) | 5.8 | 91 | — | 84 | 40 | 69 | 56 | 5 | + | 0-0-0- |
| | SpBE3 | GCCUGCUCGA | | | | | | | | | | | | 0-85 |
| R46L | EQR- | GUGCUAGCCU | (GGAG) | 20 (C13) | 3.6 | 98 | — | 33 | 35 | 76 | 58 | 3 | − | 0-0-0- |
| | SpBE3 | UGCGUUCCGA | | | | | | | | | | | | 1-23 |
| H391W | KKH- | GGCUGCUGCCC | (GTAA | 20 (C11) | 5.9 | 91 | — | 82 | 17 | 70 | 48 | 5 | + | 0-0-0- |
| (Y) | SaBE3 | ACGUGGCUG | GT) | | | | | | | | | | | 8-36 |
| A68T | SpBE3 | CCCGCACCUUG | (TGG) | 20 (C13) | 4.3 | 89 | 50 | 70 | 16 | 83 | 64 | 4 | +GG | 0-0-0- |
| | | GCGCAGCGG | | | | | | | | | | | | 4-76 |
| R194W | SpBE3 | GAGUGACCACC | (AGG) | 20 (C11) | 6.2 | 93 | 62 | 76 | 14 | 79 | 36 | 6 | − | 0-0-0- |
| | | GGGAAAUCG | | | | | | | | | | | | 3-38 |
| H193Y | SpBE3 | GAGUGACCACC | (AGG) | 20 (C8) | 6.2 | 93 | 62 | 76 | 14 | 79 | 36 | 6 | − | 0-0-0- |
| | | GGGAAAUCG | | | | | | | | | | | | 3-38 |
| E49K | SpBE3 | GCCGUCCUCCU | (AGG) | 20 (C9) | 7.0 | 94 | 53 | 78 | 24 | 62 | 50 | 7 | − | 0-0-1- |
| | | CGGAACGCA | | | | | | | | | | | | 1-28 |
| R29C | EQR- | CCCGCGGGCGC | (GGAG) | 20 (C13) | 4.3 | 92 | — | 80 | 3 | 44 | 69 | 4 | + | 0-0-0- |
| | SpBE3 | CCGUGCGCA | | | | | | | | | | | | 3-35 |
| A68T | SpBE3 | CACCUUGGCGC | (AGG) | 20 (C9) | 4.9 | 88 | 46 | 83 | 2 | 33 | 57 | 4 | + | 0-0-0- |
| | | AGCGGUGGA | | | | | | | | | | | | 8-73 |
| A53V | EQR- | UGGCCGAAGC | (GGAA) | 20 (C4) | 8.0 | 94 | — | 60 | 10 | 76 | 67 | 8 | + | 0-0-0- |
| | SpBE3 | ACCCGAGCAC | | | | | | | | | | | | 1-50 |
| H226 | St3BE3 | AGUCAUGGCA | (AGGG | 20 (C4) | 4.9 | 85 | 49 | 85 | 4 | 49 | 50 | 4 | + | 0-0-0- |
| | | CCCACCUGGC | G) | | | | | | | | | | | 1-54 |
| R194W | SpBE3 | ACCACCGGGAA | (AGG) | 20 (C6) | 5.9 | 94 | 52 | 75 | 0 | 73 | 39 | 5 | + | 0-0-0- |
| | | AUCGAGGGC | | | | | | | | | | | | 1-48 |
| H193Y | SpBE3 | CCACCGGGAAA | (GGG) | 20 (C2) | 4.5 | 94 | 52 | 75 | 0 | 73 | 39 | 5 | + | 0-0-0- |
| | | UCGAGGGCA | | | | | | | | | | | | 1-48 |
| C375Y | VQR- | GCAGUCGCUG | (TGAT) | 20 (C2) | 5.4 | 83 | — | 85 | 32 | 84 | 80 | 5 | − | 0-0-0- |
| | SpBE3 | GAGGCACCAA | | | | | | | | | | | | 5-89 |
| R237R | SpBE3 | CGGGAUGCCGG | (GGG) | 20 (C1) | 7.6 | 83 | 41 | 60 | 10 | 62 | 85 | 7 | + | 0-0-0- |
| | | CGUGGCCAA | | | | | | | | | | | | 4-50 |
| R237Q | SpBE3 | CGGGAUGCCGG | (GGG) | 20 (C1) | 7.6 | 83 | 41 | 60 | 10 | 62 | 85 | 7 | + | 0-0-0- |
| | | CGUGGCCAA | | | | | | | | | | | | 4-50 |
| S47F | SpBE3 | GCCUUGCGUU | (CGG) | 20 (C6) | 4.4 | 82 | 68 | 85 | 27 | 68 | 49 | 4 | + | 0-0-0- |
| | | CCGAGGAGGA | | | | | | | | | | | | 3-75 |
| R46L | SpBE3 | GCCUUGCGUU | (CGG) | 20 (C7) | 4.4 | 82 | 68 | 85 | 27 | 68 | 49 | 4 | + | 0-0-0- |
| | | CCGAGGAGGA | | | | | | | | | | | | 3-75 |
| R46L | SpBE3 | GCCUUGCGUU | (CGG) | 20 (C7) | 4.4 | 82 | 68 | 85 | 27 | 68 | 49 | 4 | + | 0-0-0- |
| | | CCGAGGAGGA | | | | | | | | | | | | 3-75 |
| A53V | SpBE3 | CUGGCCGAAGC | (CGG) | 20 (C5) | 4.4 | 88 | 58 | 79 | 4 | 53 | 61 | 4 | + | 0-0-0- |
| | | ACCCGAGCA | | | | | | | | | | | | 3-87 |
| R46H | SpBE3 | UCGGAACGCA | (CAG) | 20 (C7) | 5.1 | 90 | 63 | 24 | 32 | 77 | 63 | 5 | − | 0-0-0- |
| | | AGGCUAGCAC | | | | | | | | | | | | 4-25 |
| R29C | VRER- | CGUGCGCAGGA | (GGCG) | 21 (C−1) | 5.9 | 98 | — | 53 | 2 | 60 | 68 | 5 | + | 0-0-0- |
| | SpBE3 | GGACGAGGAC | | | | | | | | | | | | 0-17 |
| G452D | SaBE3 | GCCAACCUGCA | (TGGG | 20 (C6) | 7.2 | 95 | 37 | 53 | 11 | 71 | 10 | 7 | + | 0-0-0- |
| | | AAAAGGGCC | AT) | | | | | | | | | | | 0-34 |
| R194W | KKH- | CGGGAAAUCG | (CATG | 20 (C1) | 5.9 | 93 | — | 13 | 6 | 69 | 73 | 5 | + | 0-0-0- |
| | SaBE3 | AGGGCAGGGU | GT) | | | | | | | | | | | 2-26 |
| A443T | St3BE3 | GGGCAGGGCGG | (TGGG | 20 (C9) | 4.2 | 79 | 34 | 82 | 3 | 76 | 85 | 4 | + | 0-0-1- |
| | | CCACCAGGU | G) | | | | | | | | | | | 13-127 |
| R237R | VRER- | UGGUCAGCGG | (GGCG) | 20 (C12) | 6.7 | 98 | — | 41 | 1 | 23 | 66 | 6 | + | 0-0-0- |
| | SpBE3 | CCGGGAUGCC | | | | | | | | | | | | 1-8 |
| R237Q | VRER- | UGGUCAGCGG | (GGCG) | 20 (C12) | 6.7 | 98 | — | 41 | 1 | 23 | 66 | 6 | + | 0-0-0- |
| | SpBE3 | CCGGGAUGCC | | | | | | | | | | | | 1-8 |
| R46L | SpBE3 | GCGUUCCGAG | (TGG) | 20 (C2) | 4.8 | 85 | 48 | 78 | 13 | 72 | 43 | 4 | + | 0-0-0- |
| | | GAGGACGGCC | | | | | | | | | | | | 5-58 |
| S47F | SpBE3 | GCGUUCCGAG | (TGG) | 20 (C5) | 4.8 | 85 | 48 | 78 | 13 | 72 | 43 | 4 | + | 0-0-0- |
| | | GAGGACGGCC | | | | | | | | | | | | 5-58 |
| A220V | KKH- | UCGAGCAGGCC | (GACA | 20 (C10) | 7.7 | 89 | — | 41 | 12 | 66 | 73 | 7 | − | 0-0-1- |
| | SaBE3 | AGCAAGUGU | GT) | | | | | | | | | | | 0-20 |
| A443T | SaBE3 | GGCAGGGCGGC | (GGGG | 20 (C7) | 5.5 | 84 | 24 | 28 | 0 | 58 | 78 | 5 | − | 0-0-0- |
| | | CACCAGGUU | GT) | | | | | | | | | | | 4-64 |
| L253F | SpBE3 | CGUGCUCAAC | (AGG) | 20 (C5) | 6.0 | 78 | 52 | 73 | 6 | 84 | 39 | 6 | − | 0-0-0- |
| | | UGCCAAGGGA | | | | | | | | | | | | 7-82 |
| A68T | KKH- | GCGCAGCGGUG | (TGTG | 20 (C2) | 5.5 | 91 | 27 | 71 | 1 | 44 | 53 | 5 | + | 0-0-0- |
| | SaBE3 | GAAGGUGGC | GT) | | | | | | | | | | | 2-37 |
| R29C | VQR- | GCGGGCGCCCG | (GGAC) | 20 (C10) | 7.5 | 83 | — | 78 | 29 | 78 | 67 | 7 | + | 0-0-1- |
| | SpBE3 | UGCGCAGGA | | | | | | | | | | | | 13-60 |
| A220T | SpBE3 | UGGCCUGCUCG | (AGG) | 20 (C4) | 6.0 | 88 | 56 | 73 | 21 | 62 | 49 | 6 | − | 0-0-0- |
| | | ACGAACACA | | | | | | | | | | | | 6-49 |
| E49K | SpBE3 | GGCCGUCCUCC | (AAG) | 20 (C10) | 6.0 | 96 | 46 | 53 | 5 | 65 | 30 | 6 | + | 0-0-0- |
| | | UCGGAACGC | | | | | | | | | | | | 1-27 |
| R93C | SpBE3 | AGCGCACUGCC | (CAG) | 20 (C3) | 8.7 | 78 | 36 | 83 | 2 | 59 | 67 | 8 | + | 0-0-1- |
| | | CGCCGCCUG | | | | | | | | | | | | 9-104 |
| L253F | SpBE3 | GCGUGCUCAAC | (AAG) | 20 (C6) | 4.8 | 75 | 54 | 80 | 16 | 84 | 63 | 4 | +GG | 0-0-0- |
| | | UGCCAAGGG | | | | | | | | | | | | 5-93 |
| S153N | SaBE3 | AGCAUCCCGUG | (GCGG | 20 (C3) | 5.4 | 93 | — | 66 | 20 | 51 | 53 | 5 | + | 0-0-0- |
| | | GAACCUGGA | AT) | | | | | | | | | | | 3-21 |
| R29C | VQR- | GCCCGUGCGCA | (GGAC) | 20 (C4) | 7.7 | 81 | — | 76 | 28 | 77 | 60 | 7 | + | 0-0-0- |
| | SpBE3 | GGAGGACGA | | | | | | | | | | | | 4-91 |
| R29C | EQR- | GGCGCCCGUGC | (CGAG) | 20 (C7) | 4.0 | 68 | — | 90 | 6 | 70 | 62 | 4 | + | 0-0-2- |
| | SpBE3 | GCAGGAGGA | | | | | | | | | | | | 11-115 |
| S373N, | KKH- | GUGCUGCAGU | (ACCA | 20 | 6.6 | 90 | — | 68 | 4 | 64 | 62 | 6 | + | 0-0-0- |
| D374N | SaBE3 | CGCUGGAGGC | AT) | (C11/7) | | | | | | | | | | 3-30 |
| S153N | SpBE3 | AGAGCAUCCCG | (GAG) | 20 (C5) | 7.1 | 75 | 59 | 71 | 19 | 83 | 72 | 7 | − | 0-0-2- |
| | | UGGAACCUG | | | | | | | | | | | | 9-100 |
| R29C | St3BE3 | CGUGCGCAGGA | (CGGC | 20 (C1) | 6.7 | 76 | 58 | 81 | 27 | 73 | 70 | 6 | + | 0-0-0- |
| | | GGACGAGGA | G) | | | | | | | | | | | 4-127 |
| R237R | SpBE3 | CAGCGGCCGGG | (TGG) | 20 (C8) | 5.3 | 77 | 58 | 80 | 3 | 74 | 78 | 5 | + | 0-0-0- |
| | | AUGCCGGCG | | | | | | | | | | | | 15-170 |
| R237Q | SpBE3 | CAGCGGCCGGG | (TGG) | 20 (C8) | 5.3 | 77 | 58 | 80 | 3 | 74 | 78 | 5 | + | 0-0-0- |
| | | AUGCCGGCG | | | | | | | | | | | | 15-170 |
| T77I | SaBE3 | GCAGCACCUGC | (CAGA | 20 (C7) | 5.6 | 90 | — | 19 | 28 | 66 | 47 | 5 | − | 0-0-1- |
| | | UUUGUGUCA | GT) | | | | | | | | | | | 0-35 |
| T377I | SaBE3 | GCAGCACCUGC | (CAGA | 20 (C7) | 5.6 | 90 | — | 19 | 28 | 66 | 47 | 5 | − | 0-0-1- |
| | | UUUGUGUCA | GT) | | | | | | | | | | | 0-35 |
| C378Y | St3BE3 | AAAGCAGGUG | (TGGA | 20 (C5) | 5.1 | 86 | 43 | 39 | 1 | 70 | 61 | 5 | + | 0-0-1- |
| | | CUGCAGUCGC | G) | | | | | | | | | | | 11-50 |
| S376N | St3BE3 | AAAGCAGGUG | (TGGA | 20 (C13) | 5.1 | 86 | 43 | 39 | 1 | 70 | 61 | 5 | + | 0-0-1- |
| | | CUGCAGUCGC | G) | | | | | | | | | | | 11-50 |
| A220T | SpBE3 | CUGGCCUGCUC | (AAG) | 20 (C5) | 4.5 | 98 | 48 | 43 | 8 | 55 | 57 | 4 | − | 0-0-0- |
| | | GACGAACAC | | | | | | | | | | | | 2-29 |
| A68T | VQR- | ACCUUGGCGCA | (GGTG) | 20 (C8) | 7.5 | 97 | — | 30 | 10 | 58 | 55 | 7 | − | 0-0-0- |
| | SpBE3 | GCGGUGGAA | | | | | | | | | | | | 1-1 |
| M1I | EQR- | CGGUGCCCAUG | (GGAG) | 20 (C8) | 6.2 | 57 | — | 97 | 33 | 65 | 68 | 6 | +GG | 0-0-6- |
| | SpBE3 | AGGGCCAGG | | | | | | | | | | | | 18-117 |
| P12L | EQR- | AGCGGCCACCA | (GGAG) | 20 (C6) | 8.2 | 82 | — | 51 | 2 | 72 | 57 | 8 | + | 0-0-1- |
| | SpBE3 | GGACCGCCU | | | | | | | | | | | | 9-94 |
| A443T | St3BE3 | GGCAGGGCGGC | (GGGG | 20 (C8) | 5.5 | 76 | 24 | 28 | 0 | 58 | 78 | 5 | − | 0-0-0- |
| | | CACCAGGUU | G) | | | | | | | | | | | 7-131 |
| E57K | SpBE3 | CGUGCUCGGG | (AGG) | 20 (C7) | 7.1 | 94 | 48 | 53 | 3 | 60 | 50 | 7 | + | 0-0-0- |
| | | UGCUUCGGCC | | | | | | | | | | | | 2-33 |
| R194W | SpBE3 | CCACCGGGAAA | (GGG) | 20 (C5) | 4.5 | 83 | 59 | 63 | 31 | 70 | 66 | 4 | + | 0-0-1- |
| | | UCGAGGGCA | | | | | | | | | | | | 9-66 |
| A53V | SpBE3 | ACGGCCUGGCC | (GAG) | 20 (C10) | 6.9 | 77 | 60 | 76 | 6 | 72 | 60 | 6 | + | 0-0-2- |
| | | GAAGCACCC | | | | | | | | | | | | 11-91 |
| L253F | SpBE3 | UGCGCGUGCUC | (GGG) | 20 (C9) | 3.7 | 85 | 52 | 67 | 50 | 60 | 53 | 3 | − | 0-0-1- |
| | | AACUGCCAA | | | | | | | | | | | | 25-90 |
| G27D | EQR- | ACGGGCGCCCG | (GGAG) | 20 (C8) | 8.3 | 71 | — | 81 | 7 | 72 | 76 | 8 | + | 0-0-1- |
| | SpBE3 | CGGGACCCA | | | | | | | | | | | | 16-40 |
| S386 | SpBE3 | AUCACAGGCU | (TGG) | 20 (C3) | 5.1 | 61 | 59 | 91 | 16 | 43 | 70 | 5 | + | 0-0-3- |
| | | GCUGCCCACG | | | | | | | | | | | | 13-177 |
| G27D | St3BE3 | CACGGGCGCCC | (AGGA | 20 (C9) | 6.3 | 87 | 35 | 65 | 1 | 43 | 59 | 6 | + | 0-0-0- |
| | | GCGGGACCC | G) | | | | | | | | | | | 1-52 |
| R237R | SaBE3 | GCCGGGAUGCC | (AAGG | 20 (C3) | 7.8 | 96 | — | 43 | 2 | 54 | 55 | 7 | + | 0-0-0- |
| | | GGCGUGGCC | GT) | | | | | | | | | | | 0-17 |
| R237Q | SaBE3 | GCCGGGAUGCC | (AAGG | 20 (C3) | 7.8 | 96 | — | 43 | 2 | 54 | 55 | 7 | + | 0-0-0- |
| | | GGCGUGGCC | GT) | | | | | | | | | | | 0-17 |
| M1I | EQR- | GUGCCCAUGA | (AGAG) | 20 (C6) | 6.2 | 57 | — | 92 | 9 | 88 | 79 | 6 | +GG | 0-0-0- |
| | SpBE3 | GGGCCAGGGG | | | | | | | | | | | | 23-227 |
| R194Q | St3BE3 | CCGGUGGUCAC | (TGGT | 20 (C2) | 6.4 | 95 | 50 | 10 | 9 | 54 | 42 | 6 | − | 0-0-0- |
| | | UCUGUAUGC | G) | | | | | | | | | | | 1-17 |
| R237Q | St3BE3 | GUGGUCAGCG | (CGGC | 20 (C13) | 5.0 | 89 | 40 | 54 | 2 | 49 | 60 | 5 | + | 0-0-0- |
| | | GCCGGGAUGC | G) | | | | | | | | | | | 5-55 |
| R29C | SpBE3 | CGCCCGUGCGC | (AGG) | 20 (C5) | 4.4 | 64 | 43 | 85 | 10 | 60 | 49 | 4 | + | 0-0-1- |
| | | AGGAGGACG | | | | | | | | | | | | 15-154 |
| S153N | St3BE3 | CCAGAGCAUCC | (TGGA | 20 (C7) | 8.6 | 90 | 45 | 59 | 3 | 41 | 32 | 8 | + | 0-0-1- |
| | | CGUGGAACC | G) | | | | | | | | | | | 2-68 |
| M1I | SpBE3 | ACGGUGCCCAU | (GGG) | 20 (C9) | 5.1 | 54 | 59 | 81 | 10 | 77 | 92 | 5 | + | 0-0-6- |
| | | GAGGGCCAG | | | | | | | | | | | | 24-136 |
| D186 | SpBE3 | CUAGGAGAUA | (AGG) | 20 (C1) | 4.3 | 75 | 63 | 66 | 70 | 66 | 39 | 4 | + | 0-0-0- |
| | | CACCUCCACC | | | | | | | | | | | | 14-90 |
| H193Y | EQR- | CAGAGUGACC | (CGAG) | 20 (C10) | 7.6 | 83 | — | 40 | 3 | 31 | 62 | 7 | − | 0-0-0- |
| | SpBE3 | ACCGGGAAAU | | | | | | | | | | | | 7-134 |
| G452D | SpBE3 | CCAACCUGCAA | (GGG) | 20 (C5) | 4.9 | 69 | 46 | 68 | 41 | 75 | 39 | 4 | + | 0-0-1- |
| | | AAAGGGCCU | | | | | | | | | | | | 18-136 |
| G106R | SpBE3 | GGUAUCCCCGG | (TGG) | 20 (C7) | 5.7 | 67 | 28 | 77 | 3 | 53 | 23 | 5 | + | 0-0-2- |
| | | CGGGCAGCC | | | | | | | | | | | | 9-108 |
| R29C | SpBE3 | GCGCCCGUGCG | (GAG) | 20 (C6) | 8.3 | 77 | 31 | 66 | 5 | 57 | 67 | 8 | + | 0-0-0- |
| | | CAGGAGGAC | | | | | | | | | | | | 6-85 |
| A68T | SpBE3 | CUUGGCGCAGC | (TGG) | 20 (C6) | 7.7 | 62 | 54 | 81 | 9 | 61 | 78 | 7 | +GG | 0-0-2- |
| | | GGUGGAAGG | | | | | | | | | | | | 23-187 |
| G106R | SpBE3 | GUAUCCCCGGC | (GGG) | 20 (C6) | 5.9 | 71 | 37 | 49 | 6 | 72 | 57 | 5 | + | 0-0-2- |
| | | GGGCAGCCU | | | | | | | | | | | | 16-83 |
| A53V | EQR- | GACGGCCUGGC | (CGAG) | 20 (C11) | 6.2 | 86 | — | 57 | 2 | 52 | 55 | 6 | + | 0-0-0- |
| | SpBE3 | CGAAGCACC | | | | | | | | | | | | 10-48 |
| L253F | SpBE3 | CUGCGCGUGCU | (AGG) | 20 (C10) | 7.9 | 84 | 50 | 34 | 7 | 59 | 44 | 7 | + | 0-0-1- |
| | | CAACUGCCA | | | | | | | | | | | | 26-105 |
| C378Y | EQR- | AAGCAGGUGC | (GGAG) | 20 (C4) | 7.4 | 85 | — | 38 | 23 | 52 | 56 | 7 | + | 0-0-0- |
| | SpBE3 | UGCAGUCGCU | | | | | | | | | | | | 13-118 |
| C375Y | EQR- | AAGCAGGUGC | (GGAG) | 20 (C12) | 7.4 | 85 | — | 38 | 23 | 52 | 56 | 7 | + | 0-0-0- |
| | SpBE3 | UGCAGUCGCU | | | | | | | | | | | | 13-118 |
| S376N | EQR- | AAGCAGGUGC | (GGAG) | 20 (C10) | 7.4 | 85 | — | 38 | 23 | 52 | 56 | 7 | + | 0-0-0- |
| | SpBE3 | UGCAGUCGCU | | | | | | | | | | | | 13-118 |
| A290V | VRER- | CCCUGGCGGGU | (CGCG) | 20 (C7) | 5.9 | 99 | — | 42 | 0 | 32 | 42 | 5 | − | 0-0-0- |
| | SpBE3 | GGGUACAGC | | | | | | | | | | | | 0-16 |
| S373N, | KKH- | CUGCAGUCGC | (AATG | 20 (C8/ | 7.8 | 90 | — | 15 | 1 | 28 | 51 | 7 | + | 0-0-1- |
| D374N | SaBE3 | UGGAGGCACC | AT) | 4) | | | | | | | | | | 1-33 |
| M1I | St3BE3 | UGACGGUGCCC | (AGGG | 20 (C10) | 5.5 | 83 | 42 | 32 | 2 | 56 | 34 | 5 | + | 0-0-1- |
| | | AUGAGGGCC | G) | | | | | | | | | | | 6-47 |
| G452D | SpBE3 | GCCAACCUGCA | (TGG) | 20 (C6) | 7.2 | 68 | 37 | 53 | 11 | 71 | 10 | 7 | + | 0-0-7- |
| | | AAAAGGGCC | | | | | | | | | | | | 12-130 |
| E57K | SpBE3 | GGUUCCGUGC | (CGG) | 20 (C12) | 9.1 | 88 | 49 | 34 | 18 | 43 | 39 | 9 | − | 0-0-0- |
| | | UCGGGUGCUU | | | | | | | | | | | | 4-46 |
| C378Y | SpBE3 | AAAGCAGGUG | (TGG) | 20 (C5) | 5.1 | 65 | 43 | 39 | 1 | 70 | 61 | 5 | + | 0-0-3- |
| | | CUGCAGUCGC | | | | | | | | | | | | 35-165 |
| S376N | SpBE3 | AAAGCAGGUG | (TGG) | 20 (C11) | 5.1 | 65 | 43 | 39 | 1 | 70 | 61 | 5 | + | 0-0-3- |
| | | CUGCAGUCGC | | | | | | | | | | | | 35-165 |
| R194Q | VQR- | CGGUGGUCAC | (GGTG) | 20 (C1) | 6.1 | 100 | — | 3 | 3 | 33 | 35 | 6 | − | 0-0-0- |
| | SpBE3 | UCUGUAUGCU | | | | | | | | | | | | 0-0 |
| E57K | SpBE3 | CCGUGCUCGGG | (CAG) | 20 (C8) | 6.1 | 88 | 39 | 4 | 2 | 40 | 46 | 6 | + | 0-0-0- |
| | | UGCUUCGGC | | | | | | | | | | | | 3-53 |
| M1I | SpBE3 | GACGGUGCCCA | (GGG) | 20 (C10) | 7.8 | 48 | 51 | 47 | 21 | 83 | 60 | 7 | + | 0-1-3- |
| | | UGAGGGCCA | | | | | | | | | | | | 22-128 |
| S153N | EQR- | CAGAGCAUCCC | (GGAG) | 20 (C6) | 6.4 | 77 | — | 35 | 10 | 47 | 54 | 6 | − | 0-0-2- |
| | SpBE3 | GUGGAACCU | | | | | | | | | | | | 6-98 |
| L253F | SpBE3 | GUGCUCAACU | (GGG) | 20 (C3) | 4.3 | 53 | 56 | 60 | 41 | 74 | 72 | 4 | − | 0-0-3- |
| | | GCCAAGGGAA | | | | | | | | | | | | 40-225 |
| S153N | SpBE3 | CCAGAGCAUCC | (TGG) | 20 (C7) | 8.6 | 68 | 45 | 59 | 3 | 41 | 32 | 8 | + | 0-0-4- |
| | | CGUGGAACC | | | | | | | | | | | | 14-201 |
| P12L | SpBE3 | CAGCGGCCACC | (TGG) | 20 (C8) | 6.6 | 61 | 43 | 63 | 17 | 53 | 48 | 6 | + | 0-1-0- |
| | | AGGACCGCC | | | | | | | | | | | | 28-213 |
| P14S | SpBE3 | CAGCGGCCACC | (TGG) | 20 (C1) | 6.6 | 61 | 43 | 63 | 17 | 53 | 48 | 6 | + | 0-1-0- |
| | | AGGACCGCC | | | | | | | | | | | | 28-213 |
| G27D | SpBE3 | CACGGGCGCCC | (AGG) | 20 (C9) | 6.3 | 59 | 35 | 65 | 1 | 43 | 59 | 6 | + | 0-0-2- |
| | | GCGGGACCC | | | | | | | | | | | | 17-172 |
| T77I | EQR- | CAGCACCUGCU | (AGAG) | 20 (C6) | 7.6 | 58 | — | 5 | 2 | 23 | 61 | 7 | − | 0-0-2- |
| | SpBE3 | UUGUGUCAC | | | | | | | | | | | | 33-235 |
| T377I | EQR- | CAGCACCUGCU | (AGAG) | 20 (C6) | 7.6 | 58 | — | 5 | 2 | 23 | 61 | 7 | − | 0-0-2- |
| | SpBE3 | UUGUGUCAC | | | | | | | | | | | | 33-235 |
| R194Q | SpBE3 | CCGGUGGUCAC | (TGG) | 20 (C2) | 6.4 | 62 | 50 | 10 | 9 | 54 | 42 | 6 | − | 0-0-1- |
| | | UCUGUAUGC | | | | | | | | | | | | 7-168 |
| G263S | SpBE3 | CGCUAACCGUG | (TGG) | 20 (C1) | 4.8 | 71 | 40 | 7 | 8 | 43 | 42 | 4 | − | 0-0-1- |
| | | CCCUUCCCU | | | | | | | | | | | | 8-65 |
| R46L | VQR- | CUAGCCUUGC | (GGAC) | 20 (C10) | 7.1 | 64 | — | 28 | 21 | 47 | 45 | 7 | + | 0-0-1- |
| | SpBE3 | GUUCCGAGGA | | | | | | | | | | | | 29-728 |
| P616S/ | St3BE3 | AAUCCCGGCCC | (AGGT | 20 | 6.6 | 40 | 51 | 44 | 12 | 60 | 40 | 6 | + | 0-0-0- |
| L | | CUCAGGAGC | G) | (C4/5) | | | | | | | | | | 39-583 |

*Guide sequences (the portion of the guide RNA that targets the nucleobase editor to the target sequence) are provided, which may be used with any tracrRNA framework sequences provided herein to generate the full guide RNA sequence
^{a}BE types: SpBE3 = APOBEC1-SpCas9n-UGI; VQR-SpBE3 = APOBEC1-VQR-SpCas9n-UGI; EQR-SpBE3 = APOBEC1-EQR-SpCas9n-UGI; VRER-SpBE3 = APOBEC1-VRER-SpCas9n-UGI; SaBE3 = APOBEC1-SaCas9n-UGI; KKH-SaBE3 = APOBEC1-KKH-SaCas9n-UGI; St3BE3 = APOBEC1-St3Cas9n-UGI; St1BE3 = APOBEC1-St1Cas9n-UGI.
^{b}Efficiency score, based on Housden et al (Science Signaling, 2015, 8(393): r59).
^{c}Specificity scores based on Hsu et al (Nature biotechnology, 2013, 31(9): 827-832), Fusi et al (bioRxiv 021568; doi: http://dx.doi.org/10.1101/021568), Chari et al (Nature Methods, 2015, 12(9): 823-6), Doench et al (Nature Biotechnology, 2014, 32(12): 1262-7), Wang et al (Science, 2014, 343(6166): 80-4), Moreno-Mateos et al (Nature Methods, 2015, 12(10): 982-8), Housden et al (Science Signaling, 2015, 8(393): r59), and the “Prox/GC” column shows “+” if the proximal 6 bp to the PAM has a GC count >= 4, and GG if the guide ends with GG, based on Farboud et al (Genetics, 2015, 199(4): 959-71).
^{d}Number of predicted off-target binding sites in the human genome allowing up to 0, 1, 2, 3 or 4 mismatches, respectively shown in the format 0-1-2-3-4. Algorithm used: Haeussler et al, Genome Biol. 2016; 17: 148.

TABLE 10
Efficiency and Specificity Scores for gRNAs for PCSK9 Variants to Destabilize Protein
Folding. Guide sequences correspond to SEQ ID NOs: 1438-1620 from top to bottom.

| | BE | | | gRNA size | | | | | | | M.- | Hous | Prox/ | Off- |
|---|---|---|---|---|---|---|---|---|---|---|---|---|---|---|
| Variants | type^{a} | guidesequence | PAM | (C edited) | Eff.^{b} | Hsu^{c} | Fusi | C. | Doench | W. | M. | den | GC | targets |
| P163S/L | VRER- | AUUACCCCUCCA | (GGCG) | 20 | 6.5 | 100 | — | 97 | 70 | 72 | 33 | 6 | + | 0-0-0- |
| and/or | SpBE3 | CGGUACCG | | (C7,8,10,11) | | | | | | | | | | 0-0 |
| P164S/L | | | | | | | | | | | | | | |
| P163S/L | SaBE3 | UUACCCCUCCAC | (GCGGAT) | 20 | 7.8 | 100 | — | 97 | 46 | 83 | 62 | 7 | +GG | 0-0-0- |
| and/or | | GGUACCGG | | (C6,7,9,10) | | | | | | | | | | 0-2 |
| P164S/L | | | | | | | | | | | | | | |
| P138S/L | St3BE3 | GCCCCAUGUCGA | (AGGAG) | 20 (C2/3) | 6.5 | 99 | 73 | 96 | 24 | 79 | 26 | 6 | − | 0-0-0- |
| | | CUACAUCG | | | | | | | | | | | | 0-5 |
| P138S/L | SpBE3 | GCCCCAUGUCGA | (AGG) | 20 (C2/3) | 6.5 | 98 | 73 | 96 | 24 | 79 | 26 | 6 | − | 0-0-0- |
| | | CUACAUCG | | | | | | | | | | | | 0-16 |
| P585S/L | VQR- | CGAGGUCAGCCC | (CGTG) | 20 (C10/11) | 7.5 | 99 | — | 94 | 4 | 58 | 78 | 7 | + | 0-0-0- |
| and/or | SpBE3 | AACCAGUG | | | | | | | | | | | | 0-1 |
| C558Y | | | | | | | | | | | | | | |
| P581S/L | VQR- | GCCACGAGGUCA | (AGTG) | 20 (C2/3) | 5.2 | 99 | — | 93 | 1 | 54 | 41 | 5 | + | 0-0-0- |
| | SpBE3 | GCCCAACC | | | | | | | | | | | | 0-7 |
| P404S/L | SaBE3 | CGAGCCGGAGCU | (CCGAGT) | 20 (C5/6) | 5.5 | 96 | — | 95 | 25 | 78 | 85 | 5 | +GG | 0-0-0- |
| | | CACCCUGG | | | | | | | | | | | | 1-12 |
| P75S/L | St3BE3 | GUUGCCUGGCAC | (TGGTG) | 20 (C5/6) | 9.4 | 98 | 73 | 88 | 15 | 92 | 60 | 9 | +GG | 0-0-0- |
| | | CUACGUGG | | | | | | | | | | | | 0-14 |
| P585S/L | VRER- | CACGAGGUCAGC | (TGCG) | 20 (C12/13) | 4.4 | 100 | — | 87 | 20 | 90 | 69 | 4 | − | 0-0-0- |
| and/or | SpBE3 | CCAACCAG | | | | | | | | | | | | 0-5 |
| C558Y | | | | | | | | | | | | | | |
| P56S/L | SpBE3 | AGCACCCGAGCA | (CAG) | 20 (C5/6) | 4.0 | 93 | 56 | 97 | 36 | 70 | 38 | 4 | − | 0-0-0- |
| | | CGGAACCA | | | | | | | | | | | | 2-46 |
| P155S/L | VRER- | GAGCAUCCCGUG | (AGCG) | 20 (C7/8) | 4.2 | 98 | — | 90 | 46 | 84 | 65 | 4 | +GG | 0-0-0- |
| | SpBE3 | GAACCUGG | | | | | | | | | | | | 1-3 |
| P163S/L | SaBE3 | CCCUCCACGGUA | (ATGAAT) | 20 (C2,3,5,6) | 5.3 | 99 | — | 88 | 7 | 70 | 56 | 5 | +GG | 0-0-0- |
| and/or | | CCGGGCGG | | | | | | | | | | | | 0-6 |
| P164S/L | | | | | | | | | | | | | | |
| P445S/L | KKH- | UGCCCCCCAGCA | (GCAGGT) | 20 (C3,4,6,7) | 4.4 | 91 | — | 96 | 7 | 66 | 61 | 4 | +GG | 0-0-0- |
| and/or | SaBE3 | CCCAUGGG | | | | | | | | | | | | 3-38 |
| P446S/L | | | | | | | | | | | | | | |
| C255Y | VRER- | GCAGUUGAGCAC | (TGCG) | 20 (C2) | 8.2 | 99 | — | 85 | 6 | 79 | 20 | 8 | + | 0-0-0- |
| | SpBE3 | GCGCAGGC | | | | | | | | | | | | 0-7 |
| G516R/E | VQR- | ACCCUCACCCCC | (TGTG) | 20 (C10/11) | 5.6 | 100 | — | 24 | 9 | 83 | 20 | 5 | − | 0-0-0- |
| | SpBE3 | AAAAGCGU | | | | | | | | | | | | 0-3 |
| P581S/L | KKH- | GAGGCCACGAGG | (ACCAGT) | 20 (C5/6) | 4.6 | 96 | — | 61 | 12 | 87 | 81 | 4 | + | 0-0-0- |
| | SaBE3 | UCAGCCCA | | | | | | | | | | | | 1-18 |
| P75S/L | SpBE3 | GUUGCCUGGCAC | (TGG) | 20 (C5/6) | 9.4 | 90 | 73 | 88 | 15 | 92 | 60 | 9 | +GG | 0-0-0- |
| | | CUACGUGG | | | | | | | | | | | | 4-63 |
| P163S/L | SpBE3 | UACCCCUCCACG | (CGG) | 20 (C5,6,8,9) | 5.6 | 97 | 70 | 85 | 72 | 79 | 67 | 5 | +GG | 0-0-0- |
| and/or | | GUACCGGG | | | | | | | | | | | | 0-24 |
| P164S/L | | | | | | | | | | | | | | |
| P163S/L | VQR- | CCUCCACGGUAC | (TGAA) | 20 (C1,2,4,5) | 6.4 | 96 | — | 86 | 2 | 46 | 60 | 6 | + | 0-0-0- |
| and/or | SpBE3 | CGGGCGGA | | | | | | | | | | | | 1-26 |
| P164S/L | | | | | | | | | | | | | | |
| P288S/L | SaBE3 | GGUGCUGCUGCC | (GTGGGT) | 20 (C11/12) | 4.3 | 89 | — | 86 | 13 | 93 | 83 | 4 | +GG | 0-0-1- |
| | | CCUGGCGG | | | | | | | | | | | | 8-76 |
| P616S/L | KKH- | GGAAUCCCGGCC | (GCAGGT) | 20 (C7/8) | 4.0 | 94 | — | 86 | 23 | 87 | 53 | 4 | − | 0-0-0- |
| and/or | SaBE3 | CCUCAGGA | | | | | | | | | | | | 1-26 |
| P618S/L | | | | | | | | | | | | | | |
| C601Y | VRER- | CCUGGGGCAUGG | (AGCG) | 20 (C12) | 4.5 | 91 | — | 89 | 22 | 71 | 54 | 4 | + | 0-0-0- |
| | SpBE3 | CAGCAGGA | | | | | | | | | | | | 0-41 |
| C655Y | SpBE3 | CACACGUGUUGU | (TAG) | 20 (C3) | 5.4 | 98 | 58 | 71 | 22 | 82 | 36 | 5 | + | 0-0-0- |
| | | CUACGGCG | | | | | | | | | | | | 2-21 |
| G337R/E | KKH- | CCCCAACUGUGA | (AAAGGT) | 20 (C3/4) | 4.6 | 94 | — | 85 | 13 | 60 | 50 | 4 | +GG | 0-0-0- |
| | SaBE3 | UGACCUGG | | | | | | | | | | | | 3-20 |
| P25S/L | VRER- | CUGGGUCCCGCG | (TGCG) | 20 (C7/8) | 5.8 | 90 | — | 70 | 1 | 55 | 88 | 5 | + | 0-0-0- |
| | SpBE3 | GGCGCCCG | | | | | | | | | | | | 1-60 |
| C67Y | St3BE3 | CACCUUGGCGCA | (AGGTG) | 20 (C11) | 4.9 | 95 | 46 | 83 | 2 | 33 | 57 | 4 | + | 0-0-0- |
| | | GCGGUGGA | | | | | | | | | | | | 2-33 |
| P467S/L | SpBE3 | ACACUCGGGGCC | (TGG) | 20 (C11/12) | 5.3 | 96 | 57 | 82 | 3 | 73 | 46 | 5 | + | 0-0-0- |
| | | UACACGGA | | | | | | | | | | | | 3-24 |
| P75S/L | VQR- | AGGUUGCCUGGC | (GGTG) | 20 (C7/8) | 4.2 | 100 | — | 23 | 17 | 77 | 71 | 4 | − | 0-0-0- |
| | SpBE3 | ACCUACGU | | | | | | | | | | | | 0-3 |
| P540S/L | St3BE3 | UCCACCAGCUGA | (TGGGG) | 20 (C2,3,5,6) | 4.7 | 83 | 50 | 94 | 5 | 44 | 35 | 4 | + | 0-0-0- |
| and/or | | GGCCAGCA | | | | | | | | | | | | 8-70 |
| P541S/L | | | | | | | | | | | | | | |
| C255Y | SpBE3 | CCUUGGCAGUUG | (CAG) | 20 (C7) | 6.3 | 88 | 49 | 88 | 38 | 56 | 54 | 6 | + | 0-0-1- |
| | | AGCACGCG | | | | | | | | | | | | 6-46 |
| P75S/L | KKH- | AGGUUGCCUGGC | (GGTGGT) | 20 (C7/8) | 4.2 | 98 | 49 | 23 | 17 | 77 | 71 | 4 | − | 0-0-0- |
| | SaBE3 | ACCUACGU | | | | | | | | | | | | 1-16 |
| C223Y | VQR- | ACACUUGCUGGC | (CG) | 20 (C2) | 5.8 | 91 | — | 84 | 40 | 69 | 56 | 5 | + | 0-0-0- |
| | SpBE3 | CUGCUCGA | | | | | | | | | | | | 0-85 |
| C526Y | KKH- | CAUGGCACCCAC | (GGTGGT) | 20 (C12/9) | 10.1 | 85 | 47 | 90 | 14 | 77 | 57 | 10 | +GG | 0-0-0- |
| and/or | SaBE3 | CUGGCAGG | | | | | | | | | | | | 4-45 |
| C527Y | | | | | | | | | | | | | | |
| P604S/L | KKH- | CAUGCCCCAGGU | (CAAAGT) | 20 (C7/8) | 7.2 | 94 | — | 81 | 15 | 43 | 74 | 7 | − | 0-0-0- |
| | SaBE3 | CUGGAAUG | | | | | | | | | | | | 1-41 |
| P585S/L | SpBE3 | GGUCAGCCCAAC | (GGG) | 20 (C4,7,8) | 4.8 | 86 | 62 | 59 | 44 | 88 | 34 | 4 | + | 0-0-2- |
| and/or | | CAGUGCGU | | | | | | | | | | | | 6-51 |
| C558Y | | | | | | | | | | | | | | |
| C255Y | SpBE3 | CUUGGCAGUUGA | (AGG) | 20 (C6) | 5.4 | 94 | 51 | 69 | 43 | 79 | 44 | 5 | + | 0-0-0- |
| | | GCACGCGC | | | | | | | | | | | | 1-46 |
| C526Y | VQR- | GCAGCACCUGGC | (AGAC) | 20 (C5/2) | 3.8 | 84 | — | 54 | 46 | 89 | 59 | 3 | + | 0-0-2- |
| and/or | SpBE3 | AAUGGCGU | | | | | | | | | | | | 6-92 |
| C527Y | | | | | | | | | | | | | | |
| P25S/L | EQR- | CCCGCGGGCGCC | (GGAG) | 20 (C1/2) | 4.3 | 92 | — | 80 | 3 | 44 | 69 | 4 | + | 0-0-0- |
| | SpBE3 | CGUGCGCA | | | | | | | | | | | | 3-35 |
| P75S/L | St3BE3 | GAGGUUGCCUGG | (TGGTG) | 20 (C8/9) | 4.8 | 89 | 71 | 83 | 19 | 75 | 68 | 4 | + | 0-0-1- |
| | | CACCUACG | | | | | | | | | | | | 1-28 |
| P25S/L | SpBE3 | GUCCCGCGGGCG | (CAG) | 20 (C3/4) | 5.2 | 78 | 40 | 94 | 2 | 55 | 67 | 5 | + | 0-0-1- |
| | | CCCGUGCG | | | | | | | | | | | | 8-100 |
| C67Y | SpBE3 | CACCUUGGCGCA | (AGG) | 20 (C11) | 4.9 | 88 | 46 | 83 | 2 | 33 | 57 | 4 | + | 0-0-0- |
| | | GCGGUGGA | | | | | | | | | | | | 8-73 |
| P327S/L | KKH- | CCCCAGCCUCAG | (GTAGGT) | 20 (C3/4) | 8.3 | 87 | — | 84 | 34 | 67 | 64 | 8 | + | 0-0-1- |
| | SaBE3 | CUCCCGAG | | | | | | | | | | | | 6-48 |
| P56S/L | VQR- | UGGCCGAAGCAC | (GGAA) | 20 (C12/13) | 8.0 | 94 | — | 60 | 10 | 76 | 67 | 8 | + | 0-0-0- |
| | SpBE3 | CCGAGCAC | | | | | | | | | | | | 1-50 |
| P75S/L | VQR- | UUGCCUGGCACC | (GGTG) | 20 (C4/5) | 4.7 | 100 | — | 41 | 7 | 33 | 70 | 4 | + | 0-0-0- |
| | SpBE3 | UACGUGGU | | | | | | | | | | | | 0-4 |
| P173S/L | VQR- | CCCCCCGGUAAG | (TGTG) | 21 (C1,−1, | 4.6 | 99 | — | 71 | 3 | 29 | 27 | 4 | + | 0-0-0- |
| and/or | SpBE3 | ACCCCCAUC | | 3,4) | | | | | | | | | | 0-4 |
| P174S/L | | | | | | | | | | | | | | |
| C358Y | KKH- | AGGUCCACACAG | (GTTGGT) | 20 (C10) | 7.4 | 94 | — | 76 | 41 | 48 | 46 | 7 | − | 0-0-0- |
| | SaBE3 | CGGCCAAA | | | | | | | | | | | | 1-28 |
| P75S/L | KKH- | UGGAGGUUGCCU | (CGTGGT) | 20 (C10/11) | 8.2 | 93 | 40 | 36 | 7 | 43 | 76 | 8 | − | 0-0-0- |
| | SaBE3 | GGCACCUA | | | | | | | | | | | | 2-44 |
| P209S/L | VQR- | GAAUGUGCCCGA | (GGAC) | 20 (C8/9) | 6.9 | 82 | — | 87 | 32 | 87 | 52 | 6 | + | 0-0-1- |
| | SpBE3 | GGAGGACG | | | | | | | | | | | | 2-79 |
| P279S/L | St3BE3 | CCAGCCUGUGGG | (TGGTG) | 20 (C5/6) | 5.4 | 85 | 48 | 84 | 10 | 78 | 66 | 5 | +GG | 0-0-3- |
| | | GCCACUGG | | | | | | | | | | | | 7-79 |
| G232R/E | SaBE3 | CCGCUGACCACC | (GTGGGT) | 20 (C11/12) | 4.1 | 87 | — | 73 | 12 | 81 | 81 | 4 | + | 0-0-1- |
| | | CCUGCCAG | | | | | | | | | | | | 1-28 |
| C301Y | SpBE3 | GGCGCUGGCAGG | (AGG) | 20 (C9) | 4.9 | 74 | 49 | 94 | 11 | 68 | 67 | 4 | + | 0-0-1- |
| | | CGGCGUUG | | | | | | | | | | | | 23-216 |
| C358Y | KKH- | CAGCGGCCAAAG | (CAAAGT) | 20 (C1) | 6.7 | 97 | — | 18 | 12 | 47 | 71 | 6 | + | 0-0-0- |
| | SaBE3 | UUGGUCCC | | | | | | | | | | | | 1-12 |
| G384R/E | St3BE3 | CCCACUCUGUGA | (AGGTG) | 20 (C2/3) | 5.0 | 88 | 58 | 80 | 19 | 44 | 34 | 5 | − | 0-0-0- |
| | | CACAAAGC | | | | | | | | | | | | 8-66 |
| C301Y | VRER- | CUGGCAGGCGGC | (CGCG) | 20 (C5) | 6.7 | 97 | — | 63 | 11 | 65 | 70 | 6 | − | 0-0-0- |
| | SpBE3 | GUUGAGGA | | | | | | | | | | | | 3-22 |
| P331S/L | VQR- | CAGCCUCAGCUC | (GGTG) | 20 (C12/13) | 7.2 | 100 | — | 66 | 5 | 46 | 64 | 7 | − | 0-0-0- |
| | SpBE3 | CCGAGGUA | | | | | | | | | | | | 2-7 |
| G213R/E | SpBE3 | GAAGCGGGUCCC | (CGG) | 20 (C10/11) | 8.9 | 80 | 42 | 85 | 2 | 69 | 69 | 8 | + | 0-0-1- |
| | | GUCCUCCU | | | | | | | | | | | | 8-95 |
| G232R/E | St3BE3 | GCUGACCACCCC | (GGGTG) | 20 (C9/10) | 6.2 | 83 | 58 | 82 | 8 | 68 | 60 | 6 | + | 0-0-1- |
| | | UGCCAGGU | | | | | | | | | | | | 5-55 |
| G292R/E | SpBE3 | CGGCUGUACCCA | (GGG) | 20 (C10/11) | 6.4 | 79 | 60 | 86 | 19 | 78 | 82 | 6 | + | 0-0-0- |
| | | CCCGCCAG | | | | | | | | | | | | 11-86 |
| C301Y | VQR- | GCGCUGGCAGGC | (GGAC) | 20 (C8) | 5.3 | 90 | — | 58 | 10 | 50 | 75 | 5 | − | 0-0-0- |
| | SpBE3 | GGCGUUGA | | | | | | | | | | | | 8-48 |
| P331S/L | St3BE3 | UCAGCUCCCGAG | (TGGGG) | 20 (C7/8) | 6.9 | 90 | 34 | 14 | 15 | 75 | 36 | 6 | + | 0-0-0- |
| | | GUAGGUGC | | | | | | | | | | | | 6-43 |
| C655Y | SpBE3 | ACACGUGUUGUC | (AGG) | 20 (C2) | 4.5 | 99 | 61 | 26 | 14 | 66 | 59 | 4 | + | 0-0-0- |
| | | UACGGCGU | | | | | | | | | | | | 1-10 |
| C323Y | KKH- | GUAGAGGCAGGC | (GGAAGT) | 20 (C12) | 6.4 | 96 | 52 | 61 | 26 | 69 | 68 | 6 | + | 0-0-0- |
| | SaBE3 | AUCGUCCC | | | | | | | | | | | | 0-20 |
| P345S/L | SpBE3 | AAGACCAGCCGG | (GGG) | 20 (C9/10) | 6.3 | 66 | 67 | 96 | 19 | 79 | 68 | 6 | + | 0-0-1- |
| | | UGACCCUG | | | | | | | | | | | | 13-143 |
| C477Y | SpBE3 | AUCUGGGGCGCA | (CGG) | 20 (C11) | 5.1 | 84 | 45 | 78 | 17 | 73 | 75 | 5 | + | 0-0-0- |
| | | GCGGGCGA | | | | | | | | | | | | 2-112 |
| C67Y | KKH- | GCGCAGCGGUGG | (TGTGGT) | 20 (C4) | 5.5 | 91 | 27 | 71 | 1 | 44 | 53 | 5 | + | 0-0-0- |
| | SaBE3 | AAGGUGGC | | | | | | | | | | | | 2-37 |
| P138S/L | EQR- | UUGCCCCAUGUC | (CGAG) | 20 (C4/5) | 5.2 | 94 | — | 38 | 20 | 29 | 67 | 5 | − | 0-0-0- |
| | SpBE3 | GACUACAU | | | | | | | | | | | | 1-45 |
| C678Y | SpBE3 | GCAGAUGGCAAC | (CGG) | 20 (C2) | 5.4 | 82 | 50 | 57 | 14 | 79 | 56 | 5 | − | 0-0-1- |
| and/or | | GGCUGUCA | | | | | | | | | | | | 9-101 |
| C679Y | | | | | | | | | | | | | | |
| P173S/L | VQR- | UGAAUACCAGCC | (AGAC) | 20 (C11/12) | 3.7 | 97 | — | 63 | 2 | 59 | 62 | 3 | + | 0-0-0- |
| and/or | SpBE3 | CCCCGGUA | | | | | | | | | | | | 1-31 |
| P174S/L | | | | | | | | | | | | | | |
| P364S/L | KKH- | UUGCCCCAGGGG | (ATTGGT) | 20 (C6/7) | 6.2 | 91 | — | 69 | 1 | 15 | 65 | 6 | − | 0-0-0- |
| | SaBE3 | AGGACAUC | | | | | | | | | | | | 4-31 |
| G516R/E | SpBE3 | CCUCACCCCCAA | (TGG) | 20 (C9/10) | 7.5 | 78 | 57 | 82 | 13 | 52 | 14 | 7 | + | 0-0-0- |
| | | AAGCGUUG | | | | | | | | | | | | 19-108 |
| C526Y | St3BE3 | UAGCAGGCAGCA | (TGGCG) | 20 (C8/5) | 3.1 | 79 | 55 | 44 | 19 | 81 | 68 | 3 | − | 0-0-1- |
| and/or | | CCUGGCAA | | | | | | | | | | | | 5-48 |
| C527Y | | | | | | | | | | | | | | |
| P585S/L | SpBE3 | AGGUCAGCCCAA | (TGG) | 20 (C5,8,9) | 7.2 | 83 | 56 | 70 | 36 | 77 | 37 | 7 | + | 0-0-2- |
| and/or | | CCAGUGCG | | | | | | | | | | | | 6-65 |
| C558Y | | | | | | | | | | | | | | |
| P75S/L | SpBE3 | GAGGUUGCCUGG | (TGG) | 20 (C8/9) | 4.8 | 76 | 71 | 83 | 19 | 75 | 68 | 4 | + | 0-0-1- |
| | | CACCUACG | | | | | | | | | | | | 7-118 |
| P163S/L | SpBE3 | GGAUUACCCCUC | (CGG) | 20 | 6.7 | 98 | 47 | 7 | 17 | 61 | 47 | 6 | + | 0-0-1- |
| and/or | | CACGGUAC | | (C9,10,12,13) | | | | | | | | | | 1-10 |
| P164S/L | | | | | | | | | | | | | | |
| G176R/E | VRER- | GGCUGCCUCCGU | (GGCG) | 20 (C9/10) | 8.5 | 99 | — | 51 | 52 | 60 | 45 | 8 | − | 0-0-0- |
| | SpBE3 | CUUUCCAA | | | | | | | | | | | | 0-6 |
| P364S/L | St3BE3 | GCCCCAGGGGAG | (TGGTG) | 20 (C4/5) | 6.6 | 92 | 40 | 60 | 8 | 54 | 67 | 6 | − | 0-0-0- |
| | | GACAUCAU | | | | | | | | | | | | 4-53 |
| P438S/L | SpBE3 | GCGGGUACUGAC | (TGG) | 20 (C12/13) | 4.7 | 90 | 58 | 45 | 16 | 65 | 69 | 4 | + | 0-0-0- |
| | | CCCCAACC | | | | | | | | | | | | 3-50 |
| P530S/L | VRER- | UGCUACCCCAGG | (AGCG) | 20 (C6/7) | 4.1 | 99 | — | 23 | 3 | 60 | 19 | 4 | − | 0-0-0- |
| | SpBE3 | CCAACUGC | | | | | | | | | | | | 1-5 |
| G670R/E | VQR- | GCUGUCACGGCC | (GGTG) | 20 (C13/14) | 5.2 | 100 | — | 40 | 11 | 59 | 32 | 5 | − | 0-0-0- |
| | SpBE3 | CCUUCGCU | | | | | | | | | | | | 1-2 |
| P279S/L | VQR- | GUCCAGCCUGUG | (GGTG) | 20 (C7/8) | 4.7 | 99 | — | 51 | 9 | 31 | 60 | 4 | + | 0-0-0- |
| | SpBE3 | GGGCCACU | | | | | | | | | | | | 0-8 |
| G292R/E | SpBE3 | CUGUACCCACCC | (CAG) | 20 (C7/8) | 7.2 | 74 | 52 | 70 | 23 | 81 | 85 | 7 | +GG | 0-0-0- |
| | | GCCAGGGG | | | | | | | | | | | | 10-154 |
| C526Y | VRER- | AGCAGGCAGCAC | (GGCG) | 20 (C10/7) | 10.6 | 98 | — | 60 | 3 | 39 | 57 | 10 | − | 0-0-0- |
| and/or | SpBE3 | CUGGCAAU | | | | | | | | | | | | 1-16 |
| C527Y | | | | | | | | | | | | | | |
| G365R/E | KKH- | GAUGUCCUCCCC | (AGAGGT) | 20 (C11/12) | 6.9 | 89 | 46 | 69 | 4 | 67 | 61 | 6 | + | 0-0-1- |
| | SaBE3 | UGGGGCAA | | | | | | | | | | | | 1-35 |
| P138S/L | EQR- | CCCCAUGUCGAC | (GGAG) | 20 (C1/2) | 4.5 | 95 | — | 62 | 55 | 53 | 40 | 4 | − | 0-0-0- |
| | SpBE3 | UACAUCGA | | | | | | | | | | | | 1-47 |
| G213R/E | SpBE3 | AAGCGGGUCCCG | (GGG) | 20 (C9/10) | 6.6 | 75 | 45 | 18 | 7 | 43 | 82 | 6 | + | 0-0-1- |
| | | UCCUCCUC | | | | | | | | | | | | 7-55 |
| P430S/L | SaBE3 | GCCUGGUUCCCU | (GCGGGT) | 20 (C10/11) | 6.4 | 94 | — | 62 | 25 | 58 | 47 | 6 | + | 0-0-0- |
| | | GAGGACCA | | | | | | | | | | | | 2-38 |
| C655Y | St3BE3 | GACUACACACGU | (CGGCG) | 20 (C8) | 8.3 | 99 | 57 | 32 | 24 | 44 | 41 | 8 | − | 0-0-0- |
| | | GUUGUCUA | | | | | | | | | | | | 0-6 |
| G337R/E | St3BE3 | CCAACUGUGAUG | (AGGTG) | 20 (C1/2) | 5.1 | 90 | 65 | 44 | 14 | 58 | 47 | 5 | − | 0-0-0- |
| | | ACCUGGAA | | | | | | | | | | | | 2-40 |
| G450R/E | St3BE3 | UACCUGCCCCAU | (GGGGG) | 20 (C9/10) | 7.5 | 88 | 43 | 53 | 4 | 67 | 50 | 7 | + | 0-0-1- |
| | | GGGUGCUG | | | | | | | | | | | | 4-45 |
| C67Y | VQR- | ACCUUGGCGCAG | (GGTG) | 20 (C10) | 7.5 | 97 | — | 30 | 10 | 58 | 55 | 7 | − | 0-0-0- |
| | SpBE3 | CGGUGGAA | | | | | | | | | | | | 1-1 |
| P25S/L | St3BE3 | UCCCGCGGGCGC | (AGGAG) | 20 (C2) | 7.6 | 94 | 38 | 60 | 0 | 56 | 48 | 7 | + | 0-0-0- |
| | | CCGUGCGC | | | | | | | | | | | | 3-42 |
| P163S/L | VQR- | ACCCCUCCACGG | (GGAT) | 20 (C4,5,7,8) | 5.7 | 94 | — | 47 | 7 | 60 | 54 | 5 | + | 0-0-0- |
| and/or | SpBE3 | UACCGGGC | | | | | | | | | | | | 1-30 |
| P164S/L | | | | | | | | | | | | | | |
| P279S/L | KKH- | CUGGUCCAGCCU | (ACTGGT) | 20 (C10/11) | 10.8 | 83 | — | 21 | 0 | 43 | 71 | 10 | + | 0-0-0- |
| | SaBE3 | GUGGGGCC | | | | | | | | | | | | 10-77 |
| P445S/L | St3BE3 | GCCCUGCCCCCC | (TGGGG) | 20 | 5.9 | 78 | 34 | 76 | 4 | 73 | 36 | 5 | + | 0-0-1- |
| and/or | | AGCACCCA | | (C7,8,10,11) | | | | | | | | | | 17-123 |
| P446S/L | | | | | | | | | | | | | | |
| C477Y | SpBE3 | GGCGCAGCGGGC | (TGG) | 20 (C5) | 6.5 | 76 | 35 | 76 | 3 | 78 | 64 | 6 | + | 0-0-3- |
| | | GACGGCUG | | | | | | | | | | | | 21-226 |
| C600Y | VRER- | GGGGCAUGGCAG | (GTGGAT) | 20 (C13/10) | 7.4 | 81 | — | 58 | 0 | 73 | 58 | 7 | + | 0-0-0- |
| and/or | SpBE3 | CAGGAAGC | | | | | | | | | | | | 13-76 |
| C601Y | | | | | | | | | | | | | | |
| P163S/L | St3BE3 | GAUUACCCCUCC | (GGGCG) | 20 | 5.1 | 99 | 54 | 48 | 9 | 32 | 38 | 5 | + | 0-0-0- |
| and/or | | ACGGUACC | | (C8,9,11,12) | | | | | | | | | | 0-3 |
| P164S/L | | | | | | | | | | | | | | |
| C255Y | VRER- | CUUCCCUUGGCA | (CGCG) | 20 (C11) | 6.9 | 97 | — | 56 | 18 | 34 | 27 | 6 | − | 0-0-0- |
| | SpBE3 | GUUGAGCA | | | | | | | | | | | | 0-16 |
| G257R/E | VRER- | CUUCCCUUGGCA | (CGCG) | 20 (C5/6) | 6.9 | 97 | — | 56 | 18 | 34 | 27 | 6 | − | 0-0-0- |
| | SpBE3 | GUUGAGCA | | | | | | | | | | | | 0-16 |
| C588Y | VQR- | GGCCCACGCACU | (TGAC) | 20 (C9) | 4.5 | 84 | — | 28 | 1 | 69 | 22 | 4 | + | 0-0-0- |
| | SpBE3 | GGUUGGGC | | | | | | | | | | | | 8-58 |
| P288S/L | St3BE3 | GUGGUGCUGCUG | (GGGTG) | 20 (C13/14) | 7.4 | 71 | 40 | 52 | 5 | 66 | 81 | 7 | + | 0-0-1- |
| | | CCCCUGGC | | | | | | | | | | | | 24-152 |
| G292R/E | St3BE3 | CGCGGCUGUACC | (AGGGG) | 20 (C12/13) | 4.7 | 94 | 44 | 58 | 5 | 40 | 54 | 4 | + | 0-0-0- |
| | | CACCCGCC | | | | | | | | | | | | 0-25 |
| P364S/L | VQR- | CCCCAGGGGAGG | (GGTG) | 20 (C3/4) | 4.8 | 99 | — | 25 | 1 | 23 | 53 | 4 | − | 0-0-0- |
| | SpBE3 | ACAUCAUU | | | | | | | | | | | | 1-3 |
| P576S/L | SpBE3 | CCGCCUGUGCUG | (AGG) | 20 (C1,2,4,5) | 7.9 | 59 | 63 | 93 | 54 | 42 | 53 | 7 | + | 0-0-2- |
| and/or | | AGGCCACG | | | | | | | | | | | | 14-197 |
| P577S/L | | | | | | | | | | | | | | |
| P331S/L | SpBE3 | UCAGCUCCCGAG | (TGG) | 20 (C7/8) | 6.9 | 76 | 34 | 14 | 15 | 75 | 36 | 6 | + | 0-0-1- |
| | | GUAGGUGC | | | | | | | | | | | | 18-133 |
| P279S/L | KKH- | GUCCAGCCUGUG | (GGTGGT) | 20 (C7/8) | 4.7 | 90 | 30 | 51 | 9 | 31 | 60 | 4 | + | 0-0-0- |
| | SaBE3 | GGGCCACU | | | | | | | | | | | | 6-28 |
| C477Y | VQR- | GGGGCGCAGCGG | (TGTG) | 20 (C7) | 8.5 | 66 | — | 84 | 2 | 81 | 47 | 8 | + | 0-0-7- |
| | SpBE3 | GCGACGGC | | | | | | | | | | | | 24-199 |
| P155S/L | St3BE3 | CCAGAGCAUCCC | (TGGAG) | 20 (C10) | 8.6 | 90 | 45 | 59 | 3 | 41 | 32 | 8 | + | 0-0-1- |
| | | GUGGAACC | | | | | | | | | | | | 2-68 |
| G176R/E | St3BE3 | AGGCUGCCUCCG | (AGGCG) | 20 (C9/10) | 5.3 | 92 | 55 | 15 | 22 | 57 | 39 | 5 | − | 0-0-0- |
| | | UCUUUCCA | | | | | | | | | | | | 3-50 |
| P345S/L | VQR- | AGACCAGCCGGU | (GGAC) | 20 (C8/9) | 5.9 | 62 | — | 87 | 40 | 77 | 72 | 5 | +GG | 0-0-3- |
| | SpBE3 | GACCCUGG | | | | | | | | | | | | 29-319 |
| P163S/L | SpBE3 | GAUUACCCCUCC | (GGG) | 20 | 5.1 | 94 | 54 | 48 | 9 | 32 | 38 | 5 | + | 0-0-1- |
| and/or | | ACGGUACC | | (C8,9,11,12) | | | | | | | | | | 1-24 |
| P164S/L | | | | | | | | | | | | | | |
| P279S/L | St3BE3 | GGUCCAGCCUGU | (TGGTG) | 20 (C8/9) | 6.6 | 85 | 36 | 39 | 2 | 50 | 63 | 6 | + | 0-0-0- |
| | | GGGGCCAC | | | | | | | | | | | | 13-49 |
| C301Y | EQR- | CAGGCGCUGGCA | (TGAG) | 20 (C11) | 6.1 | 73 | — | 50 | 0 | 75 | 69 | 6 | + | 0-0-2- |
| | SpBE3 | GGCGGCGU | | | | | | | | | | | | 25-102 |
| G337R/E | VQR- | AUUGGUGGCCCC | (TGAC) | 20 (C11/12) | 7.1 | 76 | — | 45 | 15 | 72 | 56 | 7 | − | 0-0-2- |
| | SpBE3 | AACUGUGA | | | | | | | | | | | | 9-106 |
| G450R/E | St3BE3 | CCCAUGGGUGCU | (GGGCG) | 20 (C2/3) | 5.2 | 55 | 41 | 47 | 1 | 35 | 93 | 5 | + | 0-0-3- |
| | | GGGGGGCA | | | | | | | | | | | | 17-226 |
| C323Y | VQR- | GUAGAGGCAGGC | (GGAA) | 20 (C12) | 6.4 | 78 | — | 61 | 26 | 69 | 68 | 6 | + | 0-0-7- |
| | SpBE3 | AUCGUCCC | | | | | | | | | | | | 9-93 |
| P345S/L | St3BE3 | GCCGGUGACCCU | (TGGGG) | 20 (C2/3) | 7.4 | 84 | 33 | 41 | 1 | 33 | 63 | 7 | − | 0-0-0- |
| | | GGGGACUU | | | | | | | | | | | | 4-69 |
| G505R/E | SaBE3 | CAGCUUGCCCCC | (TAGAGT) | 20 (C11/12) | 8.1 | 86 | — | 5 | 3 | 46 | 60 | 8 | + | 0-0-0- |
| | | UUGGGCCU | | | | | | | | | | | | 4-50 |
| G493R/E | St1BE3 | CCCCGCCGCUUC | (GGAGAAA) | 20 (C13/14) | 4.5 | 97 | — | 48 | 6 | 24 | 42 | 4 | − | 0-0-0- |
| | | CCACUCCU | | | | | | | | | | | | 1-11 |
| C588Y | SpBE3 | CACUGGUUGGGC | (TGG) | 20 (C1) | 4.8 | 88 | 54 | 57 | 6 | 54 | 23 | 4 | + | 0-0-0- |
| | | UGACCUCG | | | | | | | | | | | | 2-65 |
| C601Y | SpBE3 | GGGCAUGGCAGC | (TGG) | 20 (C9) | 4.6 | 47 | 59 | 97 | 54 | 80 | 64 | 4 | + | 0-0-4- |
| | | AGGAAGCG | | | | | | | | | | | | 38-411 |
| C67Y | SpBE3 | CUUGGCGCAGCG | (TGG) | 20 (C8) | 7.7 | 62 | 54 | 81 | 9 | 61 | 78 | 7 | +GG | 0-0-2- |
| | | GUGGAAGG | | | | | | | | | | | | 23-187 |
| P364S/L | VQR- | GACCUCUUUGCC | (GGAC) | 20 (C13/14) | 2.9 | 67 | — | 41 | 5 | 76 | 59 | 2 | + | 0-0-1- |
| | SpBE3 | CCAGGGGA | | | | | | | | | | | | 11-144 |
| P120S/L | KKH- | CUUCUUCCUGGC | (GAAGAT) | 20 (C1/2) | 6.4 | 85 | — | 27 | 12 | 27 | 57 | 6 | + | 0-0-0- |
| | SaBE3 | UUCCUGGU | | | | | | | | | | | | 15-83 |
| P327S/L | St3BE3 | CCAGCCUCAGCU | (AGGTG) | 20 (C1/2) | 4.0 | 88 | 54 | 26 | 7 | 50 | 53 | 4 | + | 0-0-0- |
| | | CCCGAGGU | | | | | | | | | | | | 8-205 |
| P404S/L | EQR- | GAGCCGGAGCUC | (CGAG) | 20 (C4/5) | 7.4 | 66 | — | 76 | 4 | 62 | 62 | 7 | + | 0-0-1- |
| | SpBE3 | ACCCUGGC | | | | | | | | | | | | 13-119 |
| P478S/L | EQR- | GCCCGCUGCGCC | (GGAG) | 20 (C13) | 3.1 | 81 | — | 61 | 3 | 57 | 38 | 3 | − | 0-0-0- |
| | SpBE3 | CCAGAUGA | | | | | | | | | | | | 5-73 |
| C534Y | St3BE3 | UGUGGACGCUGC | (TGGGG) | 20 (C12) | 5.1 | 92 | 28 | 21 | 3 | 50 | 38 | 5 | + | 0-0-0- |
| | | AGUUGGCC | | | | | | | | | | | | 2-57 |
| C588Y | VQR- | CGCACUGGUUGG | (CGTG) | 20 (C3) | 4.6 | 99 | — | 21 | 4 | 43 | 37 | 4 | − | 0-0-0- |
| | SpBE3 | GCUGACCU | | | | | | | | | | | | 0-4 |
| C223Y | VQR- | GUCACACUUGCU | (CGAC) | 20 (C5) | 5.3 | 72 | — | 43 | 3 | 25 | 69 | 5 | + | 0-0-0- |
| | SpBE3 | GGCCUGCU | | | | | | | | | | | | 5-161 |
| P288S/L | VRER- | CCCCUGGCCGGGU | (CGCG) | 21 (C1/−1) | 5.9 | 99 | — | 42 | 0 | 32 | 42 | 5 | − | 0-0-0- |
| | SpBE3 | GGGUACAGC | | | | | | | | | | | | 0-16 |
| C655Y | SpBE3 | GACUACACACGU | (CGG) | 20 (C8) | 8.3 | 84 | 57 | 32 | 24 | 44 | 41 | 8 | − | 0-0-0- |
| | | GUUGUCUA | | | | | | | | | | | | 9-34 |
| P530S/L | SpBE3 | CUGCUACCCCAG | (CAG) | 20 (C7/8) | 7.4 | 61 | 61 | 50 | 28 | 68 | 80 | 7 | − | 0-0-1- |
| | | GCCAACUG | | | | | | | | | | | | 25-215 |
| C534Y | SaBE3 | UGUGGACGCUGC | (TGGGGT) | 20 (C12) | 5.1 | 90 | 28 | 21 | 3 | 50 | 38 | 5 | + | 0-0-0- |
| | | AGUUGGCC | | | | | | | | | | | | 4-70 |
| G670R/E | SpBE3 | GGCUGUCACGGC | (TGG) | 20 (C12/13) | 4.6 | 80 | 37 | 60 | 2 | 51 | 25 | 4 | + | 0-0-1- |
| | | CCCUUCGC | | | | | | | | | | | | 12-104 |
| P25S/L | SpBE3 | UCCCGCGGGCGC | (AGG) | 20 (C2/3) | 7.6 | 79 | 38 | 60 | 0 | 56 | 48 | 7 | + | 0-0-2- |
| | | CCGUGCGC | | | | | | | | | | | | 12-133 |
| G337R/E | SpBE3 | UGGCCCCAACUG | (TGG) | 20 (C6/7) | 6.0 | 78 | 61 | 10 | 1 | 35 | 36 | 6 | − | 0-0-3- |
| | | UGAUGACC | | | | | | | | | | | | 6-136 |
| P639S/L | St3BE3 | CCUGGGACCUCC | (GGGGG) | 20 (C1/2) | 5.3 | 86 | 38 | 36 | 5 | 41 | 53 | 5 | + | 0-0-1- |
| | | CACGUCCU | | | | | | | | | | | | 14-53 |
| P345S/L | St3BE3 | CCAAGACCAGCC | (TGGGG) | 20 (C11/12) | 4.3 | 92 | 44 | 38 | 2 | 46 | 33 | 4 | + | 0-0-0- |
| | | GGUGACCC | | | | | | | | | | | | 6-53 |
| C509Y | SpBE3 | GCAGACCAGCUU | (GGG) | 20 (C2) | 8.4 | 68 | 41 | 66 | 18 | 62 | 70 | 8 | + | 0-0-1- |
| | | GCCCCCUU | | | | | | | | | | | | 14-153 |
| P279S/L | SpBE3 | CCAGCCUGUGGG | (TGG) | 20 (C5/6) | 5.4 | 53 | 48 | 84 | 10 | 78 | 66 | 5 | +GG | 0-0-8- |
| | | GCCACUGG | | | | | | | | | | | | 42-299 |
| C655Y | VRER- | ACUACACACGUG | (GGCG) | 20 (C7) | 6.8 | 100 | — | 37 | 10 | 29 | 35 | 6 | − | 0-0-0- |
| | SpBE3 | UUGUCUAC | | | | | | | | | | | | 0-0 |
| G516R/E | SpBE3 | CUCACCCCCAAA | (GGG) | 20 (C8/9) | 5.6 | 89 | 47 | 26 | 5 | 32 | 21 | 5 | − | 0-0-1- |
| | | AGCGUUGU | | | | | | | | | | | | 10-68 |
| C635Y | SpBE3 | GGAGGGCACUGC | (AGG) | 20 (C13) | 4.8 | 52 | 34 | 84 | 1 | 55 | 61 | 4 | + | 0-0-5- |
| | | AGCCAGUC | | | | | | | | | | | | 33-327 |
| G365R/E | EQR- | GAUGUCCUCCCC | (AGAG) | 20 (C11/12) | 6.9 | 66 | — | 69 | 4 | 67 | 61 | 6 | + | 0-0-0- |
| | SpBE3 | UGGGGCAA | | | | | | | | | | | | 21-139 |
| G450R/E | St3BE3 | CUUACCUGCCCC | (TGGGG) | 20 (C11/12) | 8.8 | 93 | 25 | 27 | 2 | 42 | 27 | 8 | + | 0-0-0- |
| | | AUGGGUGC | | | | | | | | | | | | 3-39 |
| G337R/E | VQR- | GGCCCCAACUGU | (GGAA) | 20 (C5/6) | 4.9 | 76 | — | 45 | 15 | 58 | 43 | 4 | − | 0-0-0- |
| | SpBE3 | GAUGACCU | | | | | | | | | | | | 10-96 |
| P576S/L | KKH- | AGCCGCCUGUGC | (CGAGGT) | 20 (C4,5,6,7) | 5.3 | 81 | 41 | 27 | 10 | 49 | 53 | 5 | + | 0-0-1- |
| and/or | SaBE3 | UGAGGCCA | | | | | | | | | | | | 7-46 |
| P577S/L | | | | | | | | | | | | | | |
| P430S/L | VQR- | CCCUGAGGACCA | (TGAC) | 20 (C2/3) | 7.6 | 87 | — | 21 | 0 | 26 | 46 | 7 | + | 0-0-0- |
| | SpBE3 | GCGGGUAC | | | | | | | | | | | | 7-75 |
| P639S/L | St3BE3 | CCCUGGGACCUC | (TGGGG) | 20 (C2/3) | 6.3 | 84 | 29 | 16 | 0 | 49 | 31 | 6 | + | 0-0-1- |
| | | CCACGUCC | | | | | | | | | | | | 11-68 |
| P155S/L | EQR- | CAGAGCAUCCCG | (GGAG) | 20 (C9/10) | 6.4 | 77 | — | 35 | 10 | 47 | 54 | 6 | − | 0-0-2- |
| | SpBE3 | UGGAACCU | | | | | | | | | | | | 6-98 |
| G232R/E | VQR- | GCUGACCACCCC | (GGG) | 20 (C9/10) | 6.2 | 49 | 58 | 82 | 8 | 68 | 60 | 6 | + | 0-0-5- |
| | SpBE3 | UGCCAGGU | | | | | | | | | | | | 30-182 |
| G450R/E | St3BE3 | UUACCUGCCCCA | (GGGGG) | 20 (C10/11) | 6.4 | 90 | 29 | 40 | 3 | 17 | 35 | 6 | + | 0-0-0- |
| | | UGGGUGCU | | | | | | | | | | | | 3-35 |
| G670R/E | KKH- | GCCCCUUCGCUG | (TGTAGT) | 20 (C4/5) | 8.9 | 90 | 36 | 40 | 14 | 30 | 24 | 8 | + | 0-0-1- |
| | SaBE3 | GUGCUGCC | | | | | | | | | | | | 6-27 |
| P71S/L | SpBE3 | CAGGAUCCGUGG | (TGG) | 20 (C7/8) | 5.5 | 77 | 42 | 16 | 3 | 23 | 52 | 5 | + | 0-0-1- |
| | | AGGUUGCC | | | | | | | | | | | | 9-124 |
| C486Y | St3BE3 | CAGCUCAGCAGC | (TGGGG) | 20 (C1) | 4.9 | 87 | 21 | 15 | 0 | 20 | 42 | 4 | − | 0-0-2- |
| | | UCCUCAUC | | | | | | | | | | | | 5-64 |
| C509Y | SpBE3 | GGCAGACCAGCU | (TGG) | 20 (C3) | 4.4 | 75 | 29 | 32 | 0 | 49 | 54 | 4 | + | 0-0-3- |
| | | UGCCCCCU | | | | | | | | | | | | 21-139 |
| P209S/L | SpBE3 | AGAAUGUGCCCG | (GGG) | 20 (C9/10) | 6.2 | 66 | 47 | 43 | 16 | 62 | 47 | 6 | + | 0-0-1- |
| | | AGGAGGAC | | | | | | | | | | | | 11-200 |
| P120S/L | KKH- | CAUGGCCUUCUU | (CCTGGT) | 20 (C7/8) | 7.2 | 67 | — | 2 | 6 | 36 | 60 | 7 | − | 0-0-3- |
| | SaBE3 | CCUGGCUU | | | | | | | | | | | | 12-77 |
| G516R/E | SpBE3 | CCCCAAAAGCGU | (CGG) | 20 (C3/4) | 6.7 | 84 | 38 | 3 | 1 | 22 | 42 | 6 | + | 0-0-0- |
| | | UGUGGGCC | | | | | | | | | | | | 3-81 |
| C323Y | SpBE3 | GGCAUCGUCCCG | (CGG) | 20 (C3) | 7.2 | 77 | 47 | 21 | 28 | 44 | 38 | 7 | − | 0-0-8- |
| | | GAAGUUGC | | | | | | | | | | | | 2-42 |
| C358Y | SpBE3 | GUCCACACAGCG | (TGG) | 20 (C8) | 4.1 | 72 | 52 | 36 | 3 | 52 | 39 | 4 | − | 0-0-2- |
| | | GCCAAAGU | | | | | | | | | | | | 16-85 |
| G493R/E | St3BE3 | CUUCCCACUCCU | (TGGAG) | 20 (C5/6) | 7.3 | 88 | 30 | 8 | 9 | 17 | 36 | 7 | − | 0-0-0- |
| | | GGAGAAAC | | | | | | | | | | | | 5-69 |
| P404S/L | SpBE3 | UGCCGAGCCGGA | (TGG) | 20 (C8/9) | 4.3 | 61 | 52 | 40 | 8 | 59 | 19 | 4 | + | 0-0-1- |
| | | GCUCACCC | | | | | | | | | | | | 18-117 |
| P540S/L | EQR- | GUCCACACAGCU | (TGAG) | 20 (C13) | 3.6 | 63 | — | 44 | 6 | 55 | 1 | 3 | + | 0-0-1- |
| and/or | SpBE3 | CCACCAGC | | | | | | | | | | | | 16-165 |
| P541S/L | | | | | | | | | | | | | | |
| G505R/E | EQR- | AGCUUGCCCCCU | (AGAG) | 20 (C10/11) | 6.9 | 75 | — | 10 | 0 | 21 | 42 | 6 | + | 0-0-0- |
| | SpBE3 | UGGGCCUU | | | | | | | | | | | | 8-120 |
| C534Y | SpBE3 | UGCAGUUGGCCU | (AGG) | 20 (C3) | 8.3 | 53 | 41 | 31 | 0 | 13 | 64 | 8 | + | 0-0-4- |
| | | GGGGUAGC | | | | | | | | | | | | 28-300 |
| P576S/L | EQR- | CACCCACAAGCC | (TGAG) | 20 (C11/12) | 4.6 | 80 | — | 23 | 0 | 37 | 24 | 4 | + | 0-0-2- |
| and/or | SpBE3 | GCCUGUGC | | | | | | | | | | | | 5-129 |
| P577S/L | | | | | | | | | | | | | | |
| P345S/L | SpBE3 | GCCGGUGACCCU | (TGG) | 20 (C2/3) | 7.4 | 52 | 33 | 41 | 1 | 33 | 63 | 7 | − | 0-0-6- |
| | | GGGGACUU | | | | | | | | | | | | 20-179 |
| P430S/L | VRER- | GGCCUGGUUCCC | (AGCG) | 20 (C11/12) | 5.8 | 63 | — | 14 | 0 | 51 | 44 | 5 | + | 0-1-0- |
| | SpBE3 | UGAGGACC | | | | | | | | | | | | 3-22 |
| G232R/E | VQR- | CCCCUGCCAGGU | (TGAC) | 20 (C2/3) | 4.7 | 56 | — | 32 | 11 | 46 | 57 | 4 | + | 0-0-2- |
| | SpBE3 | GGGUGCCA | | | | | | | | | | | | 32-272 |
| P279S/L | SpBE3 | GGUCCAGCCUGU | (TGG) | 20 (C8/9) | 6.6 | 50 | 36 | 39 | 2 | 50 | 63 | 6 | + | 0-0-3- |
| | | GGGGCCAC | | | | | | | | | | | | 39-270 |
| P478S/L | EQR- | CGCCCCAGAUGA | (TGAG) | 20 (C5/6) | 5.3 | 63 | — | 50 | 1 | 35 | 14 | 5 | + | 0-0-1- |
| | SpBE3 | GGAGCUGC | | | | | | | | | | | | 14-146 |
| P288S/L | SpBE3 | UGCUGCUGCCCC | (GGG) | 20 (C9/10) | 6.3 | 60 | 46 | 32 | 4 | 45 | 51 | 6 | + | 0-0-2- |
| | | UGGCGGGU | | | | | | | | | | | | 42-286 |
| C608Y | St3BE3 | UUGACUUUGCAU | (TGGGG) | 20 (C10) | 7.7 | 77 | 34 | 2 | 3 | 34 | 12 | 7 | + | 0-0-0- |
| | | UCCAGACC | | | | | | | | | | | | 6-141 |
| P364S/L | SpBE3 | GCCCCAGGGGAG | (TGG) | 20 (C4/5) | 6.6 | 41 | 40 | 60 | 8 | 54 | 67 | 6 | − | 0-1-2- |
| | | GACAUCAU | | | | | | | | | | | | 25-189 |
| C534Y | SpBE3 | UGUGGACGCUGC | (TGG) | 20 (C12) | 5.1 | 58 | 28 | 21 | 3 | 50 | 38 | 5 | + | 0-0-3- |
| | | AGUUGGCC | | | | | | | | | | | | 25-336 |
| G450R/E | SpBE3 | UUACCUGCCCCA | (GGG) | 20 (C10/11) | 6.4 | 67 | 29 | 40 | 3 | 17 | 35 | 6 | + | 0-0-1- |
| | | UGGGUGCU | | | | | | | | | | | | 12-141 |
| P639S/L | SpBE3 | CCCUGGGACCUC | (TGG) | 20 (C2/3) | 6.3 | 57 | 29 | 16 | 0 | 49 | 31 | 6 | + | 0-0-3- |
| | | CCACGUCC | | | | | | | | | | | | 38-294 |
| P576S/L | EQR- | AGCCGCCUGUGC | (CGAG) | 20 (C3,4,6,7) | 5.3 | 49 | — | 27 | 10 | 49 | 53 | 5 | + | 0-0-5- |
| and/or | SpBE3 | UGAGGCCA | | | | | | | | | | | | 26-182 |
| P577S/L | | | | | | | | | | | | | | |
| P616S/L | St3BE3 | AAUCCCGGCCCC | (AGGTG) | 20 | 6.6 | 40 | 51 | 44 | 12 | 60 | 40 | 6 | + | 0-0-0- |
| and/or | | UCAGGAGC | | (C5,6,11,12) | | | | | | | | | | 39-583 |
| P618S/L | | | | | | | | | | | | | | |
| C635Y | SpBE3 | CACUGCAGCCAG | (CAG) | 20 (C6) | 6.7 | 47 | 42 | 4 | 3 | 35 | 52 | 6 | + | 0-0-9- |
| | | UCAGGGUC | | | | | | | | | | | | 42-425 |
| P120S/L | St3BE3 | UGGCCUUCUUCC | (TGGTG) | 20 (C4/5) | 4.1 | 64 | 22 | 6 | 1 | 12 | 34 | 4 | + | 0-0-3- |
| | | UGGCUUCC | | | | | | | | | | | | 22-144 |

*Guide sequences (the portion of the guide RNA that targets the nucleobase editor to the target sequence) are provided, which may be used with any tracrRNA framework sequences provided herein to generate the full guide RNA sequence
^{a}BE types: SpBE3 = APOBEC1-SpCas9n-UGI; VQR-SpBE3 = APOBEC1-VQR-SpCas9n-UGI; EQR-SpBE3 = APOBEC1-EQR-SpCas9n-UGI; VRER-SpBE3 = APOBEC1-VRER-SpCas9n-UGI; SaBE3 = APOBEC1-SaCas9n-UGI; KKH-SaBE3 = APOBEC1-KKH-SaCas9n-UGI; St3BE3 = APOBEC1-St3Cas9n-UGI; St1BE3 = APOBEC1-St1Cas9n-UGI.
^{b}Efficiency score, based on Housden et al (Science Signaling, 2015, 8(393): rs9).
^{c}Specificity scores based on Hsu et al (Nature biotechnology, 2013, 31(9): 827-832), Fusi et al (bioRxiv 021568; doi: http://dx.doi.org/10.1101/021568), Chari et al (Nature Methods, 2015, 12(9): 823-6), Doench et al (Nature Biotechnology, 2014, 32(12): 1262-7), Wang et al (Science, 2014, 343(6166): 80-4), Moreno-Mateos et al (Nature Methods, 2015, 12(10): 982-8), Housden et al (Science Signaling, 2015, 8(393): r59), and the “Prox/GC” column shows “+” if the proximal 6 bp to the PAM has a GC count >=4, and GG if the guide ends with GG, based on Farboud et al (Genetics, 2015, 199 (4): 959-71).
^{d}Number of predicted off-target binding sites in the human genome allowing up to 0, 1, 2, 3 or 4 mismatches, respectively shown in the format 0-1-2-3-4. Algorithm used: Haeussler et al, Genome Biol. 2016; 17: 148.

TABLE 11
Efficiency and Specificity Scores for gRNAs for Introducing Premature Stop Codon into PCSK9 Gene
via Base Editing. Guide sequences correspond to SEQ ID NOs: 1621-1700 from top to bottom.

| Target | | guide | | gRNA size | | | | | | | | Hous | Prox/ | Off- |
|---|---|---|---|---|---|---|---|---|---|---|---|---|---|---|
| codon | BE type^{a} | sequence | PAM | (C edited) | Eff.^{b} | Hsu^{c} | Fusi | C. | Doench | W. | M.-M. | den | GC | targets |
| R582 | VQR- | CGAGGUCAGCC | (CGTG) | 20 (C6/1) | 7.5 | 99 | — | 94 | 4 | 58 | 78 | 7 | + | 0-0-0- |
| and/or | SpBE3 | CAACCAGUG | | | | | | | | | | | | 0-1 |
| Q584 | | | | | | | | | | | | | | |
| R582 | VQR- | GCCACGAGGUC | (AGTG) | 20 (C11/5) | 5.2 | 99 | — | 93 | 1 | 54 | 41 | 5 | + | 0-0-0- |
| and/or | SpBE3 | AGCCCAACC | | | | | | | | | | | | 0-7 |
| Q584 | | | | | | | | | | | | | | |
| Q190 | KKH- | AGCAUACAGAG | (GGAAA | 20 (C7) | 6.0 | 98 | 83 | 93 | 52 | 84 | 60 | 6 | + | 0-0-0- |
| | SaBE3 | UGACCACCG | T) | | | | | | | | | | | 0-18 |
| R582 | VRER- | CACGAGGUCAG | (TGCG) | 20 (C9/3) | 4.4 | 100 | — | 87 | 20 | 90 | 69 | 4 | − | 0-0-0- |
| and/or | SpBE3 | CCCAACCAG | | | | | | | | | | | | 0-5 |
| Q584 | | | | | | | | | | | | | | |
| Q433 | KKH- | CAGCGGGUACU | (CCTGG | 20 (C1) | 6.6 | 97 | — | 60 | 30 | 59 | 92 | 6 | + | 0-0-0- |
| | SaBE3 | GACCCCCAA | T) | | | | | | | | | | | 1-8 |
| Q219 | KKH- | CAGACAGGUAA | (TCTGA | 20 (C5) | 5.1 | 99 | — | 77 | 38 | 89 | 62 | 5 | + | 0-0-0- |
| | SaBE3 | GCACGGCCG | T) | | | | | | | | | | | 0-16 |
| Q219 | VQR- | GACAGGUAAGC | (TGAT) | 20 (C3) | 3.8 | 97 | — | 90 | 5 | 41 | 42 | 3 | + | 0-0-0- |
| | SpBE3 | ACGGCCGUC | | | | | | | | | | | | 0-33 |
| Q342 | KKH- | GCCACCAAUGC | (GCCGG | 20 (C13) | 3.1 | 92 | — | 92 | 29 | 73 | 49 | 3 | − | 0-0-0- |
| and/or | SaBE3 | CCAAGACCA | T) | | | | | | | | | | | 2-29 |
| Q344 | | | | | | | | | | | | | | |
| R582 | KKH- | GAGGCCACGAG | (ACCAG | 20 (C8) | 4.6 | 96 | — | 61 | 12 | 87 | 79 | 4 | + | 0-0-0- |
| and/or | SaBE3 | GUCAGCCCA | T) | | | | | | | | | | | 1-18 |
| R584 | | | | | | | | | | | | | | |
| Q342 | VQR- | CAAUGCCCAAG | (TGAC) | 20 (C8) | 4.3 | 86 | — | 94 | 13 | 89 | 56 | 4 | +GG | 0-0-0- |
| and/or | SpBE3 | ACCAGCCGG | | | | | | | | | | | | 9-83 |
| Q344 | | | | | | | | | | | | | | |
| Q454 | KKH- | GCAGCUGUUUU | (TATGG | 20 (C2) | 4.3 | 89 | — | 91 | 18 | 81 | 50 | 4 | + | 0-0-0- |
| | SaBE3 | GCAGGACUG | T) | | | | | | | | | | | 3-64 |
| Q256 | KKH- | CUCAACUGCCA | (CACGG | 20 (C10) | 7.1 | 84 | — | 95 | 9 | 72 | 49 | 7 | +GG | 0-0-0- |
| | SaBE3 | AGGGAAGGG | T) | | | | | | | | | | | 5-65 |
| Q387 | KKH- | CACAGGCUGCU | (GCTGG | 20 (C3) | 7.7 | 95 | — | 81 | 4 | 56 | 73 | 7 | + | 0-0-0- |
| | SaBE3 | GCCCACGUG | T) | | | | | | | | | | | 3-23 |
| R582 | SpBE3 | GGUCAGCCCAA | (GGG) | 20 (C4/13) | 4.8 | 86 | 62 | 59 | 44 | 88 | 34 | 4 | + | 0-0-2- |
| and/or | | CCAGUGCGU | | | | | | | | | | | | 6-51 |
| Q584 | | | | | | | | | | | | | | |
| Q101X | EQR- | AGGCCCAGGCU | (GGAT) | 20 (C6) | 7.9 | 79 | — | 92 | 3 | 80 | 94 | 7 | +GG | 0-0-0- |
| | SpBE3 | GCCCGCCGG | | | | | | | | | | | | 24-153 |
| Q99X | SaBE3 | GCAGGCCCAGG | (GGGGA | 20 (C2/8) | 4.9 | 94 | 26 | 77 | 8 | 53 | 74 | 4 | + | 0-0-0- |
| and/or | | CUGCCCGCC | T) | | | | | | | | | | | 6-43 |
| Q101X | | | | | | | | | | | | | | |
| Q587 | St3BE3 | CAACCAGUGCG | (GGGAG) | 20 (C5) | 8.5 | 91 | 55 | 79 | 23 | 37 | 60 | 8 | + | 0-0-0- |
| | | UGGGCCACA | | | | | | | | | | | | 1-32 |
| Q503 | KKH- | UCUAAGGCCCA | (GCTGG | 20 (C10) | 7.7 | 94 | — | 75 | 17 | 72 | 61 | 7 | + | 0-0-0- |
| | SaBE3 | AGGGGGCAA | T) | | | | | | | | | | | 0-30 |
| Q278 | St3BE3 | CCAGCCUGUGG | (TGGTG) | 20 (C2) | 5.4 | 85 | 48 | 84 | 10 | 78 | 66 | 5 | +GG | 0-0-3- |
| and/or | | GGCCACUGG | | | | | | | | | | | | |
| Q275 | | | | | | | | | | | | | | |
| Q554 | KKH- | ACCAACAGGGC | (ACAGG | 20 (C3/6) | 5.3 | 97 | — | 71 | 0 | 29 | 49 | 5 | + | 0-0-0- |
| and/or | SaBE3 | CACGUCCUC | T) | | | | | | | | | | | 0-18 |
| Q555 | | | | | | | | | | | | | | |
| Q31 | VRER- | GUGCGCAGGAG | (GGCG) | 20 (C6) | 5.9 | 98 | — | 53 | 2 | 60 | 68 | 5 | + | 0-0-0- |
| | SpBE3 | GACGAGGAC | | | | | | | | | | | | 0-17 |
| W453 | SaBE3 | GCCAACCUGCA | (TGGGA | 20 (C2/3) | 7.2 | 95 | 37 | 53 | 11 | 71 | 10 | 7 | + | 0-0-0- |
| | | AAAAGGGCC | T) | | | | | | | | | | | 0-34 |
| Q302 | VRER- | AACGCCGCCUG | (GGCG) | 20 (C13) | 5.0 | 97 | — | 59 | 13 | 68 | 41 | 5 | + | 0-0-0- |
| | SpBE3 | CCAGCGCCU | | | | | | | | | | | | 0-14 |
| Q256 | VRER- | GCCAAGGGAAG | (AGCG) | 20 (C3) | 4.1 | 97 | — | 66 | 6 | 67 | 57 | 4 | − | 0-0-0- |
| | SpBE3 | GGCACGGUU | | | | | | | | | | | | 2-18 |
| Q302 | EQR- | CGCCGCCUGCC | (CGAG) | 20 (C11) | 8.6 | 71 | — | 93 | 11 | 54 | 52 | 8 | +GG | 0-0-0- |
| | SpBE3 | AGCGCCUGG | | | | | | | | | | | | 15-115 |
| Q275 | VQR- | AAAAGCCAGCU | (TGTG) | 20 (C7) | 9.7 | 95 | — | 67 | 1 | 50 | 46 | 9 | + | 0-0-0- |
| | SpBE3 | GGUCCAGCC | | | | | | | | | | | | 0-32 |
| Q621 | EQR- | GGAGCAGGUGA | (TGAG) | 20 (C5) | 6.2 | 62 | — | 99 | 56 | 93 | 69 | 6 | + | 0-0-2- |
| | SpBE3 | AGAGGCCCG | | | | | | | | | | | | 24-248 |
| Q172 | VQR- | UGAAUACCAGC | (AGAC) | 20 (C8) | 3.7 | 97 | — | 63 | 2 | 59 | 62 | 3 | + | 0-0-0- |
| | SpBE3 | CCCCCGGUA | | | | | | | | | | | | 1-31 |
| Q172 | SpBE3 | AUGAAUACCAG | (AAG) | 20 (C9) | 4.4 | 90 | 64 | 61 | 32 | 70 | 56 | 4 | + | 0-0-0- |
| | | CCCCCCGGU | | | | | | | | | | | | 6-48 |
| Q99X | St3BE3 | UGCAGGCCCAG | (CGGGG) | 20 (C3/9) | 6.2 | 85 | 34 | 70 | 17 | 75 | 51 | 6 | + | 0-0-0- |
| and/or | | GCUGCCCGC | | | | | | | | | | | | 3-96 |
| Q101X | | | | | | | | | | | | | | |
| Q584 | SpBE3 | AGGUCAGCCCA | (TGG) | 20 (C5) | 7.2 | 83 | 56 | 70 | 36 | 77 | 37 | 7 | + | 0-0-2- |
| | | ACCAGUGCG | | | | | | | | | | | | 6-65 |
| Q621 | SpBE3 | AGCAGGUGAAG | (AGG) | 20 (C3) | 5.2 | 62 | 61 | 98 | 23 | 58 | 69 | 5 | + | 0-0-1- |
| | | AGGCCCGUG | | | | | | | | | | | | 28-271 |
| Q531 | VQR- | UGCUACCCCAG | (AGCG) | 20 (C9) | 4.1 | 99 | — | 23 | 3 | 60 | 19 | 4 | − | 0-0-0- |
| | SpBE3 | GCCAACUGC | | | | | | | | | | | | 1-5 |
| W428 | KKH- | UCCUCAGGGAA | (ATTGA | 20 (C11/12) | 6.3 | 88 | — | 70 | 0 | 42 | 63 | 6 | + | 0-0-0- |
| | SaBE3 | CCAGGCCUC | T) | | | | | | | | | | | 3-45 |
| Q31 | VQR- | GCCCGUGCGCA | (GGAC) | 20 (C10) | 7.7 | 81 | — | 76 | 28 | 77 | 60 | 7 | + | 0-0-0- |
| | SpBE3 | GGAGGACGA | | | | | | | | | | | | 4-91 |
| Q275 | St3BE3 | AAGCCAGCUGG | (TGGGG) | 20 (C5) | 4.6 | 80 | 51 | 56 | 3 | 73 | 78 | 4 | + | 0-0-0- |
| | | UCCAGCCUG | | | | | | | | | | | | 7-79 |
| Q31 | EQR- | GGCGCCCGUGC | (CGAG) | 20 (C13) | 4.0 | 68 | — | 90 | 6 | 70 | 62 | 4 | + | 0-0-2- |
| | SpBE3 | GCAGGAGGA | | | | | | | | | | | | 11-115 |
| W10 | St3BE3 | CCAGGACCGCC | (CGGTG) | 20 (C−1) | 8.0 | 80 | 55 | 23 | 25 | 60 | 77 | 8 | − | 0-0-0- |
| and/or | | UGGAGCUGA | | | | | | | | | | | | 9-71 |
| W11 | | | | | | | | | | | | | | |
| Q31 | St3BE3 | CGUGCGCAGGA | (CGGCG | 20 (C7) | 6.7 | 76 | 58 | 81 | 27 | 73 | 70 | 6 | + | 0-0-0- |
| | | GGACGAGGA | | | | | | | | | | | | 4-127 |
| Q686 | St3BE3 | GCACCUGGCGC | (CAGGA | 19 (C11) | 7.6 | 60 | 38 | 97 | 9 | 56 | 59 | 4 | + | 0-1-0- |
| | | AGGCCUCC | G) | | | | | | | | | | | 12-76 |
| Q152 | VQR- | CUUUGCCCAGA | (GGAA) | 20 (C7) | 5.1 | 75 | — | 55 | 81 | 67 | 47 | 5 | + | 0-0-2- |
| | SpBE3 | GCAUCCCGU | | | | | | | | | | | | 8-120 |
| Q152 | VQR- | UGUCUUUGCCC | (CGTG) | 20 (C10) | 6.6 | 98 | — | 56 | 4 | 31 | 6 | 6 | + | 0-0-0- |
| | SpBE3 | AGAGCAUCC | | | | | | | | | | | | 2-19 |
| Q584 | SpBE3 | GGCCACGAGGU | (CAG) | 20 (C12) | 5.9 | 85 | 40 | 64 | 13 | 25 | 69 | 5 | + | 0-0-1- |
| | | CAGCCCAAC | | | | | | | | | | | | 4-70 |
| Q278 | KKH- | CUGGUCCAGCC | (ACTGG | 20 (C7) | 10.8 | 83 | — | 21 | 0 | 43 | 71 | 10 | + | 0-0-0- |
| and/or | SaBE3 | UGUGGGGCC | T) | | | | | | | | | | | 10-77 |
| Q275 | | | | | | | | | | | | | | |
| W10 | EQR- | AGCGGCCACCA | (GGAG) | 20 | 8.2 | 82 | — | 51 | 2 | 72 | 57 | 8 | + | 0-0-1- |
| and/or | SpBE3 | GGACCGCCU | | (C9,10,6,7) | | | | | | | | | | 9-94 |
| W11 | | | | | | | | | | | | | | |
| Q587 | EQR- | AACCAGUGCGU | (GGAG) | 20 (C4) | 4.0 | 64 | — | 90 | 15 | 67 | 70 | 4 | + | 0-0-2- |
| | SpBE3 | GGGCCACAG | | | | | | | | | | | | 15-149 |
| W10 | St3BE3 | CAGCGGCCACC | (TGGAG) | 20 | 6.6 | 90 | 43 | 63 | 17 | 53 | 48 | 6 | + | 0-0-0- |
| and/or | | AGGACCGCC | | (C10,11,7,8) | | | | | | | | | | 6-55 |
| W11 | | | | | | | | | | | | | | |
| W630 | KKH- | GUCCAGCCCUC | (CACGG | 20 (C3/4) | 3.3 | 95 | — | 52 | 7 | 57 | 32 | 3 | + | 0-0-0- |
| | SaBE3 | CUCGCAGGC | T) | | | | | | | | | | | 3-43 |
| Q152 | SpBE3 | UCUUUGCCCAG | (TGG) | 20 (C9) | 4.8 | 63 | 66 | 89 | 73 | 87 | 44 | 4 | + | 0-0-5- |
| | | AGCAUCCCG | | | | | | | | | | | | 18-163 |
| Q387 | SpBE3 | AUCACAGGCUG | (TGG) | 20 (C5) | 5.1 | 61 | 59 | 91 | 16 | 43 | 70 | 5 | + | 0-0-3- |
| | | CUGCCCACG | | | | | | | | | | | | 13-177 |
| Q342 | St3BE3 | CACCAAUGCCC | (CGGTG) | 20 (C11) | 5.0 | 94 | 53 | 57 | 39 | 42 | 20 | 5 | + | 0-0-0- |
| and/or | | AAGACCAGC | | | | | | | | | | | | 1-42 |
| Q344 | | | | | | | | | | | | | | |
| Q302 | SaBE3 | UGCCAGCGCCU | (TGGGG | 20 (C4) | 6.8 | 94 | 20 | 38 | 1 | 57 | 27 | 6 | + | 0-0-0- |
| | | GGCGAGGGC | T) | | | | | | | | | | | 3-48 |
| Q278 | KKH- | GUCCAGCCUGU | (GGTGG | 20 (C4) | 4.7 | 90 | 30 | 51 | 9 | 31 | 60 | 4 | + | 0-0-0- |
| and/or | SaBE3 | GGGGCCACU | T) | | | | | | | | | | | 6-28 |
| Q275 | | | | | | | | | | | | | | |
| Q554 | SpBE3 | CAACAGGGCCA | (AGG) | 20 (C1/4) | 9.6 | 74 | 58 | 76 | 7 | 50 | 70 | 9 | + | 0-0-1- |
| and/or | | CGUCCUCAC | | | | | | | | | | | | 17-125 |
| Q555 | | | | | | | | | | | | | | |
| Q152 | St3BE3 | CCAGAGCAUCC | (TGGAG) | 20 (C1) | 8.6 | 90 | 45 | 59 | 3 | 41 | 32 | 8 | + | 0-0-1- |
| | | CGUGGAACC | | | | | | | | | | | | 2-68 |
| Q302 | SpBE3 | CGCCUGCCAGC | (GGG) | 20 (C8) | 3.0 | 78 | 36 | 31 | 21 | 71 | 56 | 3 | + | 0-0-0- |
| | | GCCUGGCGA | | | | | | | | | | | | 13-129 |
| Q31 | SpBE3 | CGCCCGUGCGC | (AGG) | 20 (C11) | 4.4 | 64 | 43 | 85 | 10 | 60 | 49 | 4 | + | 0-0-1- |
| | | AGGAGGACG | | | | | | | | | | | | 15-154 |
| Q278 | St3BE3 | GGUCCAGCCUG | (TGGTG) | 20 (C5) | 6.6 | 85 | 36 | 39 | 2 | 50 | 63 | 6 | + | 0-0-0- |
| and/or | | UGGGGCCAC | | | | | | | | | | | | 13-49 |
| Q275 | | | | | | | | | | | | | | |
| Q190 | VQR- | AGCAUACAGAG | (GGAA) | 20 (C7) | 6.0 | 83 | — | 40 | 3 | 31 | 62 | 7 | − | 0-0-0- |
| | SpBE3 | UGACCACCG | | | | | | | | | | | | 7-134 |
| Q190 | EQR- | CAGAGUGACCA | (CGAG) | 20 (C1) | 7.6 | 83 | — | 40 | 3 | 31 | 62 | 7 | − | 0-0-0- |
| | SpBE3 | CCGGGAAAU | | | | | | | | | | | | 7-134 |
| Q686 | SaBE3 | GGCGCAGGCCU | (TCCAG | 20 (C5) | 6.3 | 69 | — | 32 | 5 | 75 | 44 | 6 | + | 0-0-1- |
| | | CCCAGGAGC | T) | | | | | | | | | | | 6-74 |
| W10 | KKH- | CACCAGGACCG | (GACGG | 20 (C3,4,1) | 7.9 | 86 | — | 56 | 1 | 39 | 50 | 7 | + | 0-0-1- |
| and/or | SaBE3 | CCUGGAGCU | T) | | | | | | | | | | | 10-41 |
| W11 | | | | | | | | | | | | | | |
| W453 | SpBE3 | GCCAACCUGCA | (TGG) | 20 (C2/3) | 7.2 | 68 | 37 | 53 | 11 | 71 | 10 | 7 | + | 0-0-7- |
| | | AAAAGGGCC | | | | | | | | | | | | 12-130 |
| Q342 | St3BE3 | CCAAGACCAGC | (TGGGG) | 20 (C2/8) | 4.3 | 92 | 44 | 38 | 2 | 46 | 33 | 4 | + | 0-0-0- |
| and/or | | CGGUGACCC | | | | | | | | | | | | 6-53 |
| Q344 | | | | | | | | | | | | | | |
| Q302 | St3BE3 | UGCCAGCGCCU | (TGGGG) | 20 (C4) | 6.8 | 80 | 20 | 38 | 1 | 57 | 27 | 6 | + | 0-0-1- |
| | | GGCGAGGGC | | | | | | | | | | | | 13-110 |
| Q587 | SpBE3 | CAACCAGUGCG | (GGG) | 20 (C5) | 8.5 | 57 | 55 | 79 | 23 | 37 | 60 | 8 | + | 0-0-0- |
| | | UGGGCCACA | | | | | | | | | | | | 34-114 |
| Q302 | SpBE3 | CCGCCUGCCAG | (AGG) | 20 (C9) | 5.4 | 63 | 40 | 72 | 6 | 72 | 50 | 5 | + | 0-0-2- |
| | | CGCCUGGCG | | | | | | | | | | | | 20-225 |
| W156 | SpBE3 | CCAGGUUCCAC | (TGG) | 20 (C8/9) | 4.0 | 71 | 29 | 4 | 2 | 63 | 33 | 4 | − | 0-0-1- |
| | | GGGAUGCUC | | | | | | | | | | | | 14-147 |
| Q433 | VQR- | CCCUGAGGACC | (TGAC) | 20 (C11) | 7.6 | 87 | — | 21 | 0 | 26 | 46 | 7 | + | 0-0-0- |
| | SpBE3 | AGCGGGUAC | | | | | | | | | | | | 7-75 |
| Q454 | VQR- | AGGUUGGCAGC | (GGAC) | 20 (C8) | 6.7 | 71 | — | 19 | 49 | 50 | 62 | 6 | − | 0-0-1- |
| | SpBE3 | UGUUUUGCA | | | | | | | | | | | | 17-178 |
| Q503 | SpBE3 | UAAGGCCCAAG | (TGG) | 20 (C8) | 5.1 | 64 | 51 | 69 | 5 | 53 | 34 | 5 | + | 0-0-0- |
| | | GGGGCAAGC | | | | | | | | | | | | 14-168 |
| W156 | VQR- | CCACGGGAUGC | (AGAC) | 20 (C1/2) | 6.4 | 60 | — | 62 | 3 | 62 | 71 | 6 | + | 0-0-3- |
| | SpBE3 | UCUGGGCAA | | | | | | | | | | | | 26-128 |
| W630 | SpBE3 | CAGGGUCCAGC | (AGG) | 20 (C7/8) | 6.3 | 63 | 55 | 66 | 2 | 55 | 60 | 6 | + | 0-0-3- |
| | | CCUCCUCGC | | | | | | | | | | | | 23-318 |
| Q31 | VQR- | GCGCAGGAGGA | (CGAC) | 20 (C4) | 6.2 | 29 | — | 99 | 54 | 91 | 90 | 6 | +GG | 0-0-4- |
| | SpBE3 | CGAGGACGG | | | | | | | | | | | | 59-1094 |
| Q587 | SpBE3 | CCAACCAGUGC | (AGG) | 20 (C6) | 4.7 | 60 | 42 | 68 | 0 | 38 | 62 | 4 | + | 0-0-7- |
| | | GUGGGCCAC | | | | | | | | | | | | 5-103 |
| Q99X | SpBE3 | CAGGCCCAGGC | (GGG) | 20 (C1/7) | 6.6 | 37 | 50 | 90 | 6 | 80 | 89 | 6 | + | 0-1-2- |
| and/or | | UGCCCGCCG | | | | | | | | | | | | 66-344 |
| Q101X | | | | | | | | | | | | | | |
| Q99X | SpBE3 | UGCAGGCCCAG | (CGG) | 20 (C3/9) | 6.2 | 52 | 34 | 70 | 17 | 75 | 51 | 6 | + | 0-0-2- |
| and/or | | GCUGCCCGC | | | | | | | | | | | | 45-342 |
| Q101X | | | | | | | | | | | | | | |
| W10 | SpBE3 | CAGCGGCCACC | (TGG) | 20 | 6.6 | 61 | 43 | 63 | 17 | 53 | 48 | 6 | + | 0-1-0- |
| and/or | | AGGACCGCC | | (C10,11,7,8) | | | | | | | | | | 28-213 |
| W11 | | | | | | | | | | | | | | |
| W630 | SpBE3 | UCAGGGUCCAG | (CAG) | 20 (C8/9) | 4.0 | 44 | 63 | 74 | 41 | 77 | 35 | 4 | + | 0-0-0- |
| | | CCCUCCUCG | | | | | | | | | | | | 47-393 |
| W10 | VQR- | CCACCAGGACC | (TGAC) | 20 | 5.7 | 55 | — | 32 | 3 | 60 | 29 | 5 | + | 0-0-6- |
| and/or | SpBE3 | GCCUGGAGC | | (C4,5,1,2) | | | | | | | | | | 37-179 |
| W11 | | | | | | | | | | | | | | |

*Guide sequences (the portion of the guide RNA that targets the nucleobase editor to the target sequence) are prov.ded, which may be used with any tracrRNA framework sequences provided herein to generate the full guide RNA sequence
aBE types: SpBE3 = APOBEC1-SpCas9n-UGI; VQR-SpBE3 = APOBEC1-VQR-SpCas9n-UGI; EQR-SpBE3 = APOBEC1-EQR-SpCas9n-UGI; VRER-SpBE3 = APOBEC1-VRER-SpCas9n-UGI; SaBE3 = APOBEC1-SaCas9n-UGI; KKH-SaBE3 = APOBEC1-KKH-SaCas9n-UGI; St3BE3 = APOBEC1-St3Cas9n-UGI; St1BE3 = APOBEC1-St1Cas9n-UGI.
bEfficiency score, based on Housden et al (Science Signaling, 2015, 8(393): rs9).
cSpecificity scores based on Hsu et al (Nature biotechnology, 2013, 31 (9): 827-832), Fusi et al (bioRxiv 021568; doi: http://dx.doi.org/10.1101/021568), Chari et al (Nature Methods, 2015, 12 (9): 823-6), Doench et al (Nature Biotechnology, 2014, 32 (12): 1262-7), Wang et al (Science, 2014, 343 (6166): 80-4), Moreno-Mateos et al (Nature Methods, 2015, 12 (10): 982-8), Housden et al (Science Signaling, 2015, 8 (393): rs9), and the “Prox/GC” column shows “+” if the proximal 6 bp to the PAM has a GC count >=4, and GG if the guide ends with GG, based on Farboud et al (Genetics, 2015, 199 (4): 959-71).
dNumber of predicted off-target binding sites in the human genome allowing up to 0, 1, 2, 3 or 4 mismatches, respectively shown in the format 0-1-2-3-4. Algorithm used: Haeussler et al, Genome Biol. 2016; 17: 148.

TABLE 12
Efficiency and Specificity Scores for gRNAs for Alteration of Intron/Exon Junctions in PCSK9 Gene
via Base Editing. Guide sequences correspond to SEQ ID NOs: 1701-1768 from top to bottom.

| | | | | gRNA | | | | | | | | | | |
|---|---|---|---|---|---|---|---|---|---|---|---|---|---|---|
| Target | | guide | | size | | | | | | | M. | Hous | Prox/ | Off- |
| intron | BE type^{a} | sequence | PAM | (C edited) | Eff.^{b} | Hsu^{c} | Fusi | Ch. | Doench | W. | M.- | den | GC | targets^{d} |
| intron 1, | KKH- | CGCACCUUGGC | (GAAGGT) | 20 (C5/6) | 5.1 | 98 | — | 85 | 2 | 48 | 53 | 5 | + | 0-0-0- |
| donor | SaBE3 | GCAGCGGUG | | | | | | | | | | | | 0-10 |
| site | | | | | | | | | | | | | | |
| intron | VQR- | GGUCACCUGCC | (GGAA) | 20 (C7) | 8.0 | 81 | — | 99 | 78 | 85 | 55 | 8 | + | 0-0-0- |
| 11, | SpBE3 | AGAGCCCGA | | | | | | | | | | | | 14-113 |
| acceptor | | | | | | | | | | | | | | |
| site | | | | | | | | | | | | | | |
| intron 6, | St3BE3 | GAUGACCUGGA | (AGGTG) | 20 (C7) | 6.3 | 81 | 73 | 98 | 52 | 88 | 52 | 6 | +GG | 0-0-2- |
| acceptor | | AAGGUGAGG | | | | | | | | | | | | 6-98 |
| site | | | | | | | | | | | | | | |
| intron 1, | VQR- | CCGCACCUUGG | (GGAA) | 20 (C6/7) | 5.2 | 93 | — | 39 | 4 | 45 | 85 | 5 | + | 0-0-0- |
| donor | SpBE3 | CGCAGCGGU | | | | | | | | | | | | 5-28 |
| site | | | | | | | | | | | | | | |
| intron 1, | St3BE3 | CACCUUGGCGC | (AGGTG) | 20 (C3/4) | 4.9 | 95 | 46 | 83 | 2 | 33 | 57 | 4 | + | 0-0-0- |
| donor | | AGCGGUGGA | | | | | | | | | | | | 2-33 |
| site | | | | | | | | | | | | | | |
| intron 1, | St3BE3 | ACACCCGCACC | (CGGTG) | 20 | 6.7 | 93 | 64 | 83 | 41 | 75 | 43 | 6 | + | 0-0-0- |
| donor | | UUGGCGCAG | | (C10/11) | | | | | | | | | | 0-26 |
| site | | | | | | | | | | | | | | |
| intron 1, | VRER- | CUACACCCGCA | (AGCG) | 20 | 9.0 | 99 | — | 27 | 23 | 77 | 31 | 9 | + | 0-0-0- |
| donor | SpBE3 | CCUUGGCGC | | (C12/13) | | | | | | | | | | 0-7 |
| site | | | | | | | | | | | | | | |
| intron 4, | VQR- | ACACUUGCUGG | (CGAA) | 20 (C13) | 5.8 | 91 | — | 84 | 40 | 69 | 56 | 5 | + | 0-0-0- |
| acceptor | SpBE3 | CCUGCUCGA | | | | | | | | | | | | 0-85 |
| site | | | | | | | | | | | | | | |
| intron 7, | SaBE3 | CUGCAAUGCCU | (GTGAAT) | 20 (C10) | 8.0 | 88 | — | 85 | 40 | 66 | 72 | 8 | +GG | 0-0-2- |
| acceptor | | GGUGCAGGG | | | | | | | | | | | | 5-52 |
| site | | | | | | | | | | | | | | |
| intron 6, | SaBE3 | UGACCUGGAAA | (GTGGGT) | 20 (C5) | 7.6 | 78 | — | 95 | 38 | 80 | 65 | 7 | + | 0-0-1- |
| acceptor | | GGUGAGGAG | | | | | | | | | | | | 8-99 |
| site | | | | | | | | | | | | | | |
| intron 1, | SpBE3 | CCCGCACCUUG | (TGG) | 20 (C7/8) | 4.3 | 89 | 50 | 70 | 16 | 83 | 64 | 4 | +GG | 0-0-0- |
| donor | | GCGCAGCGG | | | | | | | | | | | | 4-76 |
| site | | | | | | | | | | | | | | |
| intron 8, | St3BE3 | AUCCUGCUUAC | (GGGTG) | 20 | 4.3 | 92 | 47 | 38 | 7 | 39 | 80 | 4 | + | 0-0-0- |
| donor | | CUGCCCCAU | | (C11/12) | | | | | | | | | | 3-22 |
| site | | | | | | | | | | | | | | |
| intron 1, | SpBE3 | GCACCUUGGCG | (AGG) | 20 (C4/5) | 7.0 | 81 | 38 | 91 | 4 | 78 | 73 | 7 | +GG | 0-0-1- |
| donor | | CAGCGGUGG | | | | | | | | | | | | 11-110 |
| site | | | | | | | | | | | | | | |
| intron 1, | SpBE3 | CACCUUGGCGC | (AGG) | 20 (C3/4) | 4.9 | 88 | 46 | 83 | 2 | 33 | 57 | 4 | + | 0-0-0- |
| donor | | AGCGGUGGA | | | | | | | | | | | | 8-73 |
| site | | | | | | | | | | | | | | |
| intron | KKH- | ACCUGUGAGGA | (GTTGGT) | 20 (C2/3) | 9.0 | 96 | — | 62 | 3 | 47 | 72 | 9 | + | 0-0-0- |
| 10, | SaBE3 | CGUGGCCCU | | | | | | | | | | | | 2-20 |
| donor | | | | | | | | | | | | | | |
| site | | | | | | | | | | | | | | |
| intron 8, | SaBE3 | GCCAACCUGCA | (TGGGAT) | 20 (C7) | 7.2 | 95 | 37 | 53 | 11 | 71 | 10 | 7 | + | 0-0-0- |
| acceptor | | AAAAGGGCC | | | | | | | | | | | | 0-34 |
| site | | | | | | | | | | | | | | |
| intron 1, | SpBE3 | ACACCCGCACC | (CGG) | 20 | 6.7 | 82 | 64 | 83 | 41 | 75 | 43 | 6 | + | 0-0-0- |
| donor | | UUGGCGCAG | | (C10/11) | | | | | | | | | | 1-92 |
| site | | | | | | | | | | | | | | |
| intron 7, | KKH- | CAAUGCCUGGU | (AATGGT) | 20 (C7) | 6.0 | 85 | — | 79 | 1 | 53 | 80 | 6 | + | 0-0-0- |
| acceptor | SaBE3 | GCAGGGGUG | | | | | | | | | | | | 8-57 |
| site | | | | | | | | | | | | | | |
| intron | St1BE3 | CACCUGCCAGA | (AAAGAAA) | 20 (C4) | 3.8 | 98 | — | 53 | 4 | 64 | 49 | 3 | + | 0-0-0- |
| 11, | | GCCCGAGGA | | | | | | | | | | | | 0-13 |
| acceptor | | | | | | | | | | | | | | |
| site | | | | | | | | | | | | | | |
| intron | St3BE3 | CUGUGAGGACG | (TGGTG) | 20 (C1/-1) | 8.3 | 90 | 54 | 21 | 3 | 32 | 72 | 8 | + | 0-0-0- |
| 10, | | UGGCCCUGU | | | | | | | | | | | | 5-34 |
| donor | | | | | | | | | | | | | | |
| site | | | | | | | | | | | | | | |
| intron 3, | SpBE3 | UCUUUCCAAGG | (TGG) | 20 (C2) | 6.3 | 74 | 44 | 88 | 7 | 26 | 35 | 6 | − | 0-0-1- |
| acceptor | | CGACAUUUG | | | | | | | | | | | | 9-123 |
| site | | | | | | | | | | | | | | |
| intron 1, | SpBE3 | GAUCCUGGCCC | (AGG) | 20 (C5) | 8.1 | 62 | 70 | 99 | 65 | 78 | 49 | 8 | +GG | 0-0-3- |
| acceptor | | CAUGCAAGG | | | | | | | | | | | | 24-164 |
| site | | | | | | | | | | | | | | |
| intron 4, | SpBE3 | UGGCCUGCUCG | (AGG) | 20 (C5) | 6.0 | 88 | 56 | 73 | 21 | 62 | 49 | 6 | − | 0-0-0- |
| acceptor | | ACGAACACA | | | | | | | | | | | | 6-49 |
| site | | | | | | | | | | | | | | |
| intron 1, | St3BE3 | ACGGAUCCUGG | (AGGAG) | 20 (C8) | 4.4 | 93 | 53 | 65 | 6 | 61 | 65 | 4 | − | 0-0-0- |
| acceptor | | CCCCAUGCA | | | | | | | | | | | | 2-27 |
| site | | | | | | | | | | | | | | |
| intron 7, | SpBE3 | CUUACCAGCCA | (CAG) | 20 (C5/6) | 10.6 | 66 | 54 | 92 | 43 | 76 | 50 | 10 | + | 0-0-2- |
| donor | | CGUGGGCAG | | | | | | | | | | | | 17-161 |
| site | | | | | | | | | | | | | | |
| intron 6, | KKH- | GUGAUGACCUG | (GGAGGT) | 20 (C9) | 3.7 | 77 | 59 | 27 | 58 | 80 | 61 | 3 | − | 0-0-0- |
| acceptor | SaBE3 | GAAAGGUGA | | | | | | | | | | | | 7-93 |
| site | | | | | | | | | | | | | | |
| intron 6, | St3BE3 | UGUGAUGACCU | (AGGAG) | 20 (C10) | 7.2 | 75 | 73 | 80 | 15 | 77 | 51 | 7 | − | 0-0-0- |
| acceptor | | GGAAAGGUG | | | | | | | | | | | | 10-98 |
| site | | | | | | | | | | | | | | |
| intron 8, | St3BE3 | UACCUGCCCCA | (GGGGG) | 20 (C3/4) | 7.5 | 88 | 43 | 53 | 4 | 67 | 50 | 7 | + | 0-0-1- |
| donor | | UGGGUGCUG | | | | | | | | | | | | 4-45 |
| site | | | | | | | | | | | | | | |
| intron 7, | St3BE3 | AUGCCUGGUGC | (TGGTG) | 20 (C4) | 5.5 | 76 | 46 | 79 | 6 | 27 | 73 | 5 | − | 0-0-1- |
| acceptor | | AGGGGUGAA | | | | | | | | | | | | 9-108 |
| site | | | | | | | | | | | | | | |
| intron 8, | VQR- | UUACCUGCCCC | (GGGG) | 20 (C4/5) | 6.4 | 76 | 46 | 79 | 6 | 27 | 73 | 5 | − | 0-0-1- |
| donor | SpBE3 | AUGGGUGCU | | | | | | | | | | | | 9-108 |
| site | | | | | | | | | | | | | | |
| intron 1, | VQR- | ACCUUGGCGCA | (GGTG) | 20 (C2/3) | 7.5 | 97 | — | 30 | 10 | 58 | 55 | 7 | − | 0-0-0- |
| donor | SpBE3 | GCGGUGGAA | | | | | | | | | | | | 1-1 |
| site | | | | | | | | | | | | | | |
| intron 5, | KKH- | AGGCCUGGGAG | (CAAGGT) | 20 (C5) | 5.5 | 82 | — | 61 | 3 | 58 | 71 | 5 | − | 0-0-3- |
| acceptor | SaBE3 | GAACAAAGC | | | | | | | | | | | | 2-66 |
| site | | | | | | | | | | | | | | |
| intron 3, | SpBE3 | UGGGGGUCUUA | (TGG) | 20 | 5.2 | 81 | 42 | 8 | 1 | 69 | 58 | 5 | + | 0-0-0- |
| donor | | CCGGGGGGC | | (C12/13) | | | | | | | | | | 6-130 |
| site | | | | | | | | | | | | | | |
| intron | VQR- | CCUGCCAGAGC | (AGAA) | 20 (C2) | 4.6 | 72 | — | 78 | 10 | 50 | 56 | 4 | − | 0-0-2- |
| 11, | SpBE3 | CCGAGGAAA | | | | | | | | | | | | 18-206 |
| acceptor | | | | | | | | | | | | | | |
| site | | | | | | | | | | | | | | |
| intron | St3BE3 | AACCACAGCUC | (AGGGG) | 20 (C12) | 4.5 | 67 | 45 | 83 | 3 | 63 | 49 | 4 | + | 0-0-2- |
| 10, | | CUGGGGCAG | | | | | | | | | | | | 15-115 |
| acceptor | | | | | | | | | | | | | | |
| site | | | | | | | | | | | | | | |
| intron 1, | EQR- | CGGAUCCUGGC | (GGAG) | 20 (C7) | 5.0 | 79 | — | 37 | 18 | 69 | 69 | 5 | − | 0-0-1- |
| acceptor | SpBE3 | CCCAUGCAA | | | | | | | | | | | | 4-79 |
| site | | | | | | | | | | | | | | |
| intron | St3BE3 | GGCCUCUUCAC | (AGGGG) | 20 | 4.1 | 78 | 46 | 70 | 3 | 55 | 31 | 4 | + | 0-0-0- |
| 11, | | CUGCUCCUG | | (C11/12) | | | | | | | | | | 3-70 |
| donor | | | | | | | | | | | | | | |
| site | | | | | | | | | | | | | | |
| intron 6, | SpBE3 | AGCACCUACCU | (AGG) | 20 (C8/9) | 7.4 | 58 | 53 | 89 | 12 | 63 | 42 | 7 | + | 0-0-0- |
| donor | | CGGGAGCUG | | | | | | | | | | | | 11-200 |
| site | | | | | | | | | | | | | | |
| intron 1, | VQR- | CACCCGCACCU | (GGTG) | 20 (C9/10) | 7.7 | 98 | — | 43 | 0 | 24 | 49 | 7 | + | 0-0-0- |
| donor | SpBE3 | UGGCGCAGC | | | | | | | | | | | | 1-10 |
| site | | | | | | | | | | | | | | |
| intron 6, | EQR- | ACUGUGAUGAC | (TGAG) | 20 (C12) | 5.4 | 55 | — | 91 | 16 | 80 | 50 | 5 | −GG | 0-0-4- |
| acceptor | SpBE3 | CUGGAAAGG | | | | | | | | | | | | 24-240 |
| site | | | | | | | | | | | | | | |
| intron 4, | SaBE3 | GUGCUUACCUG | (GCGGGT) | 20 (C8/9) | 6.2 | 83 | — | 25 | 28 | 62 | 62 | 6 | − | 0-0-0- |
| donor | | UCUGUGGAA | | | | | | | | | | | | 7-69 |
| site | | | | | | | | | | | | | | |
| intron 9, | KKH- | UGGGCCUUAGA | (GGAAAT) | 20 (C6) | 4.2 | 82 | 62 | 16 | 60 | 50 | 54 | 4 | − | 0-0-2- |
| acceptor | SaBE3 | GUCAAAGAC | | | | | | | | | | | | 11-69 |
| site | | | | | | | | | | | | | | |
| intron 4, | VQR- | CGUGCUUACCU | (AGCG) | 20 (C9/10) | 5.9 | 99 | — | 31 | 3 | 44 | 31 | 5 | − | 0-0-0- |
| donor | SpBE3 | GUCUGUGGA | | | | | | | | | | | | 0-5 |
| site | | | | | | | | | | | | | | |
| intron 6, | St3BE3 | UACCUCGGGAG | (GGGAG) | 20 (C3) | 5.0 | 66 | 51 | 66 | 1 | 63 | 76 | 5 | + | 0-0-1- |
| donor | | CUGAGGCUG | | | | | | | | | | | | 8-135 |
| site | | | | | | | | | | | | | | |
| intron | SpBE3 | CGGUCACCUGC | (AGG) | 20 (C8) | 4.4 | 61 | 58 | 78 | 25 | 69 | 80 | 4 | + | 0-0-2- |
| 11, | | CAGAGCCCG | | | | | | | | | | | | 23-116 |
| acceptor | | | | | | | | | | | | | | |
| site | | | | | | | | | | | | | | |
| intron 7, | SpBE3 | UGGUGACUUAC | (GGG) | 20 | 4.3 | 69 | 68 | 47 | 19 | 66 | 71 | 4 | + | 0-0-2- |
| donor | | CAGCCACGU | | (C11/12) | | | | | | | | | | 15-47 |
| site | | | | | | | | | | | | | | |
| intron 8, | SpBE3 | GCCAACCUGCA | (TGG) | 20 (C7) | 7.2 | 68 | 37 | 53 | 11 | 71 | 10 | 7 | + | 0-0-7- |
| acceptor | | AAAAGGGCC | | | | | | | | | | | | 12-130 |
| site | | | | | | | | | | | | | | |
| intron 7, | SpBE3 | UGACUUACCAG | (CAG) | 20 (C8/9) | 4.6 | 56 | 64 | 83 | 59 | 68 | 66 | 4 | +GG | 0-0-2- |
| donor | | CCACGUGGG | | | | | | | | | | | | 11-269 |
| site | | | | | | | | | | | | | | |
| intron 2, | EQR- | UCAAGGCCUGC | (AGAG) | 20 (C8) | 4.7 | 41 | — | 97 | 35 | 82 | 68 | 4 | + | 0-0-5- |
| acceptor | SpBE3 | AGAAGCCAG | | | | | | | | | | | | 54-318 |
| site | | | | | | | | | | | | | | |
| intron 3, | St3BE3 | CUUUCCAAGGC | (GGGAG) | 20 (C2) | 5.4 | 96 | 40 | 20 | 9 | 23 | 36 | 5 | − | 0-0-0- |
| acceptor | | GACAUUUGU | | | | | | | | | | | | 2-18 |
| site | | | | | | | | | | | | | | |
| intron 6, | EQR- | GUGAUGACCUG | (GGAG) | 20 (C9) | 3.7 | 55 | — | 27 | 58 | 80 | 61 | 3 | − | 0-0-2- |
| acceptor | SpBE3 | GAAAGGUGA | | | | | | | | | | | | 27-250 |
| site | | | | | | | | | | | | | | |
| intron 8, | St3BE3 | CUUACCUGCCC | (TGGGG) | 20 (C5/6) | 8.8 | 93 | 25 | 27 | 2 | 42 | 27 | 8 | + | 0-0-0- |
| donor | | CAUGGGUGC | | | | | | | | | | | | 3-39 |
| site | | | | | | | | | | | | | | |
| intron 4, | SpBE3 | CCGUGCUUACC | (AAG) | 20 | 9.2 | 69 | 66 | 32 | 22 | 60 | 60 | 9 | +GG | 0-0-0- |
| donor | | UGUCUGUGG | | (C10/11) | | | | | | | | | | 15-84 |
| site | | | | | | | | | | | | | | |
| intron 2, | St3BE3 | CUGCAGAAGCC | (GGGGG) | 20 (C1) | 7.7 | 67 | 43 | 66 | 3 | 61 | 49 | 7 | + | 0-0-3- |
| acceptor | | AGAGAGGCC | | | | | | | | | | | | 9-205 |
| site | | | | | | | | | | | | | | |
| intron 6, | SpBE3 | CAGCACCUACC | (GAG) | 20 (C9/10) | 6.5 | 79 | 36 | 31 | 3 | 19 | 54 | 6 | + | 0-0-2- |
| donor | | UCGGGAGCU | | | | | | | | | | | | 6-144 |
| site | | | | | | | | | | | | | | |
| intron | SpBE3 | GCCUCCUACCU | (TGG) | 20 (C9/10) | 5.6 | 65 | 49 | 52 | 13 | 66 | 32 | 5 | + | 0-0-3- |
| 10, | | GUGAGGACG | | | | | | | | | | | | 12-123 |
| donor | | | | | | | | | | | | | | |
| site | | | | | | | | | | | | | | |
| intron 3, | VQR- | CGUCUUUCCAA | (TGTG) | 20 (C4) | 5.9 | 100 | — | 8 | 5 | 21 | 31 | 5 | − | 0-0-0- |
| acceptor | SpBE3 | GGCGACAUU | | | | | | | | | | | | 0-1 |
| site | | | | | | | | | | | | | | |
| intron 1, | SpBE3 | ACGGAUCCUGG | (AGG) | 20 (C8) | 4.4 | 65 | 53 | 65 | 6 | 61 | 65 | 4 | − | 0-0-0- |
| acceptor | | CCCCAUGCA | | | | | | | | | | | | 19-137 |
| site | | | | | | | | | | | | | | |
| intron 8, | St3BE3 | UUACCUGCCCC | (GGGGG) | 20 (C4/5) | 6.4 | 90 | 29 | 40 | 3 | 17 | 35 | 6 | + | 0-0-0- |
| donor | | AUGGGUGCU | | | | | | | | | | | | 3-35 |
| site | | | | | | | | | | | | | | |
| intron | VQR- | CACCUGCUCCU | (GGAT) | 20 (C3/4) | 6.4 | 58 | — | 69 | 34 | 65 | 55 | 6 | + | 0-0-4- |
| 11, | SpBE3 | GAGGGGCCG | | | | | | | | | | | | 29-225 |
| donor | | | | | | | | | | | | | | |
| site | | | | | | | | | | | | | | |
| intron 8, | VQR- | CCUGCAAAAAG | (TGAG) | 20 (C2) | 4.9 | 50 | — | 62 | 2 | 75 | 40 | 4 | + | 0-0-2- |
| acceptor | SpBE3 | GGCCUGGGA | | | | | | | | | | | | 46-268 |
| site | | | | | | | | | | | | | | |
| intron | SaBE3 | UUCACCUGCUC | (CGGGAT) | 20 (C5/6) | 5.4 | 82 | 32 | 16 | 1 | 41 | 42 | 3 | + | 0-0-1- |
| 11, | | CUGAGGGGC | | | | | | | | | | | | 5-59 |
| donor | | | | | | | | | | | | | | |
| site | | | | | | | | | | | | | | |
| intron 6, | St3BE3 | ACCUGGAAAGG | (GGGTG) | 20 (C3) | 5.3 | 55 | 58 | 62 | 6 | 41 | 51 | 5 | + | 0-0-4- |
| acceptor | | UGAGGAGGU | | | | | | | | | | | | 28-200 |
| site | | | | | | | | | | | | | | |
| intron 9, | SpBE3 | CCCCUUGGGCC | (AAG) | 20 (C9) | 7.1 | 66 | 51 | 25 | 1 | 34 | 41 | 7 | − | 0-0-1- |
| acceptor | | UUAGAGUCA | | | | | | | | | | | | 14-144 |
| site | | | | | | | | | | | | | | |
| intron 2, | St3BE3 | CCUGCAGAAGC | (CGGGG) | 20 (C2) | 4.3 | 49 | 39 | 64 | 3 | 49 | 46 | 4 | + | 0-1-5- |
| acceptor | | CAGAGAGGC | | | | | | | | | | | | 23-194 |
| site | | | | | | | | | | | | | | |
| intron 2, | EQR- | CUUCAAGGCCU | (AGAG) | 20 (C10) | 6.5 | 54 | — | 57 | 16 | 36 | 38 | 6 | + | 0-0-2- |
| acceptor | SpBE3 | GCAGAAGCC | | | | | | | | | | | | 41-331 |
| site | | | | | | | | | | | | | | |
| intron 8, | SpBE3 | CUUACCUGCCC | (TGG) | 20 (C5/6) | 8.8 | 65 | 25 | 27 | 2 | 42 | 27 | 8 | + | 0-0-1- |
| donor | | CAUGGGUGC | | | | | | | | | | | | 21-143 |
| site | | | | | | | | | | | | | | |
| intron 8, | SpBE3 | UUACCUGCCCC | (GGG) | 20 (C4/5) | 6.4 | 67 | 29 | 40 | 3 | 17 | 35 | 6 | + | 0-0-1- |
| donor | | AUGGGUGCU | | | | | | | | | | | | 12-141 |
| site | | | | | | | | | | | | | | |

^{a}BE types: SpBE3 = APOBEC1-SpCas9n-UGI; VQR-SpBE3 = APOBEC1-VQR-SpCas9n-UGI; EQR-SpBE3 = APOBEC1-EQR-SpCas9n-UGI; VRER-SpBE3 = APOBEC1-VRER-SpCas9n-UGI; SaBE3 = APOBEC1-SaCas9n-UGI; KKH-SaBE3 = APOBEC1-KKH-SaCas9n-UGI; St3BE3 = APOBEC1-St3Cas9n-UGI; St1BE3 = APOBEC1-St1Cas9n-UGI.
^{b}Efficiency score, based on Housden et al (Science Signaling, 2015, 8(393): rs9).
^{c}Specificity scores based on Hsu et al (Nature biotechnology, 2013, 31(9): 827-832), Fusi et al (bioRxiv 021568; doi: http://dx.doi.org/10.1101/021568), Chari et al (Nature Methods, 2015, 12(9): 823-6), Doench et al (Nature Biotechnology, 2014, 32(12): 1262-7), Wang et al (Science, 2014, 343(6166): 80-4), Moreno-Mateos et al (Nature Methods, 2015, 12(10): 982-8), Housden et al (Science Signaling, 2015, 8(393): rs9), and the “Prox/GC” column shows “+” the proximal 6 bp to the PAM has a GC count >=4, and GG if the guide ends with GG, based on Farboud et al (Genetics, 2015, 199(4): 959-71).
^{d}Number of predicted off-target binding sites in the human genome allowing up to 0, 1, 2, 3 or 4 mismatches, respectively shown in the format 0-1-2-3-4. Algorithm used: Haeussler et al, Genome Biol. 2016; 17: 148

[0148] Other Protective Variants

[0149] The LDL-R mediated cholesterol clearance pathway involves multiple players. Non-limiting examples of protein factors involved in this pathway include: Apolipoprotein C3 (APOC3), LDL receptor (LDL-R), and Increased Degradation of LDL Receptor Protein (IDOL). These protein factors and their respective function are described in the art. Further, loss-of-function variants of these factors have been identified and characterized, and are determined to have cardio protective functions. See, e.g., Jørgensen et al., N Engl J Med 2014; 371:32-41 Jul. 3, 2014; Scholtz 1 et al., Hum. Mol. Genet. (1999) 8 (11): 2025-2030; De Castro-Orós et al., BMC Medical Genomics, 20147:17; and Gu et al., J Lipid Res. 2013, 54(12):3345-57, each of which are incorporated herein by reference.

[0150] Thus, some aspects of the present disclosure provide the generation of loss-of-function variants of APOC3 (e.g., A43T and R19X), LDL-R, and IDOL (e.g., R266X) using the nucleobase editors and the strategies described herein. Non-limiting examples of such variants and the guide sequence that may be used to make them are provided in Table 13.

TABLE 13
Loss-of-Function Variants of APOC3, LDL-R, and IDOL

| | | | | | gRNA | | SEQ |
|---|---|---|---|---|---|---|---|
| | Codon | Effects of | | | size | BE | ID |
| Gene | Change | mutation | Guide sequence | PAM | (C edited) | type^{a} | NOs |
| APOC3 | A43T | Lowers triglyceride | UGCAUCCUUGGCGGUCUUGG | (TGG) | 20 (C12) | SpBE3 | 1769-1773 |
| | | levels in vivo | AUCCUUGGCGGUCUUGGUGG | (CGTG) | 20 (C9) | VQR- | |
| | | | GCAUCCUUGGCGGUCUUGGU | (GGCG) | 20 (C11) | SpBE3 | |
| | | | UGCAUCCUUGGCGGUCUUGG | (TGG) | 20 (C13) | VRER- | |
| | | | UGCAUCCUUGGCGGUCUUGG | (TGGCG) | 20 (C12) | SpBE3 | |
| | | | | | | SpBE3 | |
| | | | | | | St3BE3 | |
| APOC3 | R19C | Cardioprotective, | CUCUGCCCGUAAGCACUUGG | (TGG) | 20 (C8) | SpBE3 | 1774-1780 |
| | | lower triglyceride | GGCCUCUGCCCGUAAGCACU | (TGGTG) | 20 (C11) | St3BE3 | |
| | | levels | CUGGCCUCUGCCCGUAAGCA | (CTTGGT) | 20 (C13) | KKH- | |
| | | | UCUGCCCGUAAGCACUUGGU | (GGG) | 20 (C7) | SaBE3 | |
| | | | CUGCCCGUAAGCACUUGGUG | (GGAC) | 20 (C6) | SpBE3 | |
| | | | GCCUCUGCCCGUAAGCACUU | (GGTG) | 20 (C10) | VQR- | |
| | | | GGCCUCUGCCCGUAAGCACU | (TGG) | 20 (C11) | SpBE3 | |
| | | | | | | VQR- | |
| | | | | | | SpBE3 | |
| | | | | | | SpBE3 | |
| APOC3 | Splicing | Associated with | UGCUUACGGGCAGAGGCCAG | (GAG) | 20 (C7) | SpBE3 | 1781-1787 |
| | variant | lower triglyceride | AGUGCUUACGGGCAGAGGCC | (AGGAG) | 20 (C9) | St3BE3 | |
| | IVS2 G | levels | GUGCUUACGGGCAGAGGCCA | (GGAG) | 20 (C9) | St3BE3 | |
| | to A | | AAGUGCUUACGGGCAGAGGC | (CAG) | 20 (C10) | SpBE3 | |
| | | | AGUGCUUACGGGCAGAGGCC | (AGG) | 20 (C9) | SpBE3 | |
| | | | CGGGCAGAGGCCAGGAGCGC | (CAG) | 20 (C1) | SpBE3 | |
| | | | GCUUACGGGCAGAGGCCAGG | (AGCG) | 20 (C6) | VRER- | |
| | | | | | | SpBE3 | |
| IDOL | R266Q | Loss-of-function | GGCUCUACCGAGCGAUAACA | (GAG) | 20 (C9) | SpBE3 | 1788-1791 |
| | | variant that lowers | CGGGCUCUACCGAGCGAUAA | (CAG) | 20 (C11) | SpBE3 | |
| | | LDL cholesterol | GGGCUCUACCGAGCGAUAAC | (AGAG) | 20 (C10) | EQR- | |
| | | levels | GCUCUACCGAGCGAUAACAG | (AGAC) | 20 (C8) | SpBE3 | |
| | | | | | | VQR- | |
| | | | | | | SpBE3 | |
| LDL-R | −124 C to T | Increased | UUAAAAAGCCGAUGUCACAU | (CGG) | 20 (C9) | SpBE3 | 1792, |
| | | transcription by 1.6 | CCGAUGUCACAUCGGCCGUU | (CGAA) | 20 (C1) | VQR- | 1793 |
| | | fold | | | | SpBE3 | |
| LDL-R | g. 3131 | Increased | AUAAACGUUGCAGCAGCUCC | (TAG) | 20 (C6) | SpBE3 | 1794-1796- |
| | T to C | transcription by 2.5 | UAAACGUUGCAGCAGCUCCU | (AGAA) | 20 (C5) | VQR- | |
| | | fold | UAUAAACGUUGCAGCAGCUC | (CTAGAAC) | 20 (C7) | SpBE3 | |
| | | | | | | St1BE3 | |
| LDL-R | D299N | Contacts PCSK9 | GUUGUUGUCCAAGCAUUCGU | (TGG) | 20 (C9) | SpBE3 | 1797-1799 |
| | | S153 N-terminal | UCCAAGCAUUCGUUGGUCCC | (TGCG) | 20 (C2) | VRER- | |
| | | amine | CCGUUGUUGUCCAAGCAUUC | (GTTGGT) | 20 (C11) | SpBE3 | |
| | | | | | | KKH- | |
| | | | | | | SaBE3 | |

*Guide sequences (the portion of the guide RNA that targets the nucleobase editor to the target sequence) are provided, which may be used with any tracrRNA framework sequences provided herein to generate the full guide RNA sequence
^{a}BE types: SpBE3 = APOBEC1-SpCas9n-UGI; VQR-SpBE3 = APOBEC1-VQR-SpCas9n-UGI; EQR-SpBE3 = APOBEC1-EQR-SpCas9n-UGI; VRER-SpBE3 = APOBEC1-VRER-SpCas9n-UGI; SaBE3 = APOBEC1- SaCas9n-UGI; KKH-SaBE3 = APOBEC1-KKH-SaCas9n-UGI; St3BE3 = APOBEC1-St3Cas9n-UGI; St1BE3 = APOBEC1-St1 Cas9n-UGI.

[0151] APOC3 Amino Acid Sequence (NC_000011.9 GRCh37.p5, SEQ ID NO: 1800) MQPRVLLVVALLALLASARASEAEDASLLSFMQGYMKHATKTAKDALSSVQESQVAQ QARGWVTDGFSSLKDYWSTVKDKFSEFWDLDPEVRPTSAVAA

[0152] APOC3 cDNA sequence showing amino acid residues assigned to the corresponding codons. Examples of residues targeted for base editing are underlined (nucleotide sequence: SEQ ID NO: 1801, protein sequence: SEQ ID NO: 1802).

```
gctcagttcatccctagaggcagctgctccaggaacagaggtgccatgcagccccgggta
                                                                                            M Q P R V
ctccttgttgttgccctcctggcgctcctggcctctgcccgagcttcagaggccgaggat
  L L V V A L L A L L A S A R A S E A E D
gcctcccttctcagcttcatgcagggttacatgaagcacgccaccaagaccgccaaggat
  A S L L S F M Q G Y M K H A T K T A K D
gcactgagcagcgtgcaggagtcccaggtggcccagcaggccaggggctgggtgaccgat
  A L S S V Q E S Q V A Q Q A R G W V T D
ggcttcagttccctgaaagactactggagcaccgttaaggacaagttctctgagttctgg
  G F S S L K D Y W S T V K D K F S E F W
gatttggaccctgaggtcagaccaacttcagccgtggctgcctgagacctcaatacccca
  D L D P E V R P T S A V A A -
```

APOC3 genomic sequence (SEQ ID NO: 1803) showing non-coding regions and introns (lowercase) as well as exons (uppercase). Examples of bases involved in splicing targeted for base editing are underlined.

gtgggcccaggggacatctcagccccgagaagggtcagcggcccctcctg
gaccaccgactccccgcagaactcctctgtgccctctcctcaccagacct
tgttcctcccagttgctcccacagccagggggcagtgagggctgctcttc
ccccagccccactgaggaacccaggaaggtgaacgagagaatcagtcctg
gtgggggctggggagggccccagacatgagaccagctcctcccccagggg
atgttatcagtgggtccagagggcaaaatagggagcctggtggagggagg
ggcaaaggcctcgggctctgagcggccttggcccttctccaccaacccct
gccctacactaagggggaggcagcggggggcacacagggtgggggcgggt
ggggggctgctgggtgagcagcactcgcctgcctggattgaaacccagag
atggaggtgctgggaggggctgtgagagctcagccctgtaaccaggcctt
gccggagccactgatgcctggtcttctgtgcctttactccaaacaccccc
cagcccaagccacccacttgttctcaagtctgaagaagcccctcacccct
ctactccaggctgtgttcagggcttggggctggtggagggaggggcctga
aattccagtgtgaaaggctgagatgggcccgaggcccctggcctatgtcc
aagccatttcccctctcaccagcctctccctggggagccagtcagctagg
aaggaatgagggctccccaggcccacccccagttcctgagctcatctggg
ctgcagggctggcgggacagcagcgtggactcagtctcctagggatttcc
caactctcccgcccgcttgctgcatctggacaccctgcctcaggccctca
tctccactggtcagcaggtgacctttgcccagcgccctgggtcctcagtg
cctgctgccctggagatgatataaaacaggtcagaaccctcctgcctgtc
TGCTCAGTTCATCCCTAGAGGCAGCTGCTCCAGgtaatgccctctgggga
ggggaaagaggaggggaggaggatgaagaggggcaagaggagctccctgc
ccagcccagccagcaagcctggagaagcacttgctagagctaaggaagcc
tcggagctggacgggtgccccccacccctcatcataacctgaagaacatg
gaggcccgggaggggtgtcacttgcccaaagctacacagggggtggggct
ggaagtggctccaagtgcaggttcccccctcattcttcaggcttagggct
ggaggaagccttagacagcccagtcctaccccagacagggaaactgaggc
ctggagagggccagaaatcacccaaagacacacagcatgttggctggact
ggacggagatcagtccagaccgcaggtgccttgatgttcagtctggtggg
ttttctgctccatcccacccacctccctttgggcctcgatccctcgcccc
tcaccagtcccccttctgagagcccgtattagcagggagccggcccctac
tccttctggcagacccagctaaggttctaccttaggggccacgccacctc
cccagggaggggtccagaggcatggggacctggggtgcccctcacaggac
acttccttgcagGAACAGAGGTGCCATGCAGCCCCGGGTACTCCTTGTTG
TTGCCCTCCTGGCGCTCCTGGCCTCTGCCCgtaagcacttggtgggactg
ggctgggggcagggtggaggcaacttggggatcccagtcccaatgggtgg
tcaagcaggagcccagggctcgtccagaggccgatccaccccactcagcc
ctgctctttcctcagGAGCTTCAGAGGCCGAGGATGCCTCCCTTCTCAGC
TTCATGCAGGGTTACATGAAGCACGCCACCAAGACCGCCAAGGATGCACT
GAGCAGCGTGCAGGAGTCCCAGGTGGCCCAGCAGGCCAGgtacacccgct
ggcctccctccccatcccccctgccagctgcctccattcccacccgcccc
tgccctggtgagatcccaacaatggaatggaggtgctccagcctcccctg
ggcctgtgcctcttcagcctcctctttcctcacagggcctttgtcaggct
gctgcgggagagatgacagagttgagactgcattcctcccaggtccctcc
tttctccccggagcagtcctagggcgtgccgttttagccctcatttccat
tttcctttcctttccctttctttctctttctatttctttctttctttctt
tctttctttctttctttctttctttctttctttctttctttctttctttc
ctttctttctttcctttctttctttcctttctttctttctttcctttctt
tctctttctttctttctttcctttttctttctttccctctcttcctttct
ctctttctttcttcttcttttttttttaatggagtctccctctgtcacct
aggctggagtgcagtggtgccatctcggctcactgcaacctccgtctccc
gggttcaacccattctcctgcctcagcctcccaagtagctgggattacag
gcacgcgccaccacacccagctaatttttgtatttttagcagagatgggg
tttcaccatgttggccaggttggtcttgaattcctgacctcaggggatcc
tcctgcctcggcctcccaaagtgctgggattacaggcatgagccactgcg
cctggccccattttccttttctgaaggtctggctagagcagtggtcctca
gcctttttggcaccagggaccagttttgtggtggacaatttttccatggg
ccagcggggatggttttgggatgaagctgttccacctcagatcatcaggc
attagattctcataaggagccctccacctagatccctggcatgtgcagtt
cacaatagggttcacactcctatgagaatgtaaggccacttgatctgaca
ggaggcggagctcaggcggtattgctcactcacccaccactcacttcgtg
ctgtgcagcccggctcctaacagtccatggaccagtacctatctatgact
tgggggttggggacccctgggctaggggtttgccttgggaggccccacct
gacccaattcaagcccgtgagtgcttctgctttgttctaagacctggggc
cagtgtgagcagaagtgtgtccttcctctcccatcctgcccctgcccatc
agtactctcctctcccctactcccttctccacctcaccctgactggcatt
agctggcatagcagaggtgttcataaacattcttagtccccagaaccggc
tttggggtaggtgttattttctcactttgcagatgagaaaattgaggctc
agagcgattaggtgacctgccccagatcacacaactaatcaatcctccaa
tgactttccaaatgagaggctgcctccctctgtcctaccctgctcagagc
caccaggttgtgcaactccaggcggtgctgtttgcacagaaaacaatgac
agccttgacctttcacatctccccaccctgtcactttgtgcctcaggccc
aggggcataaacatctgaggtgacctggagatggcagggtttgacttgtg
ctggggttcctgcaaggatatctcttctcccagggtggcagctgtggggg
attcctgcctgaggtctcagggctgtcgtccagtgaagttgagagggtgg
tgtggtcctgactggtgtcgtccagtggggacatgggtgtgggtcccatg
gttgcctacagaggagttctcatgccctgctctgttgcttcccctgactg
atttagGGGCTGGGTGACCGATGGCTTCAGTTCCCTGAAAGACTACTGGA
GCACCGTTAAGGACAAGTTCTCTGAGTTCTGGGATTTGGACCCTGAGGTC
AGACCAACTTCAGCCGTGGCTGCCTGAGACCTCAATACCCCAAGTCCACC
TGCCTATCCATCCTGCGAGCTCCTTGGGTCCTGCAATCTCCAGGGCTGCC
CCTGTAGGTTGCTTAAAAGGGACAGTATTCTCAGTGCTCTCCTACCCCAC
CTCATGCCTGGCCCCCCTCCAGGCATGCTGGCCTCCCAATAAAGCTGGAC
AAGAAGCTGCTATGagtgggccgtcgcaagtgtgccatctgtgtctgggc
atgggaaagggccgaggctgttctgtgggtgggcactggacagactccag
gtcaggcaggcatggaggccagcgctctatccaccttctggtagctgggc
agtctctgggcctcagtttcttcatctctaaggtaggaatcaccctccgt
accctgccttccttgacagctttgtgcggaaggtcaaacaggacaataag
tttgctgatactttgataaactgttaggtgctgcacaacatgacttgagt
gtgtgccccatgccagccactatgcctggcacttaagttgtcatcagagt
tgagactgtgtgtgtttactcaaaactgtggagctgacctcccctatcca
ggccccctagccctcttaggcgcacgtgaagggaggaggccggatgggct
agaggttggagtaagatgcaacgaggcactattcttggctccaccacttg
atatcagcctcagtttcttacatgtaaagtggatacaaccgtaccccctc
caccgtaggtttgccgtgagattgaaatgagagagcgttcgaaccgtttg
gcacagcacctgcacgtaaagatgcttgatcaatgttgtcatgattacag
ttgagctgactgggcccttgggacccggactggagtggtggggggcagtg
tcctgggaccaaaaagaagcacaaggtctcccaatagaggctgcttcctt
tgtgtccccaccacccgaaagatgtcaggtcagagagcccgagagctgca
gatggcttgagtagggctccactcttcagatcaaaaaactgtggcccgga
gaggcgaaggcacttggccagcatcacagagccagcacgtggcagggcca
gaccttgagcccaggtcagctgcgtgtattctgctcagttggtgcagaaa
acagttttgtcactcctatgtcaggtgttagggactcctttacagatctc
agtggcatcagtac
IDOL Amino Acid Sequence

(SEQ ID NO: 1804)

MLCYVTRPDAVLMEVEVEAKANGEDCLNQVCRRLGIIEVDYFGLQFTGSK
GESLWLNLRNRISQQMDGLAPYRLKLRVKFFVEPHLILQEQTRHIFFLHI
KEALLAGHLLCSPEQAVELSALLAQTKFGDYNQNTAKYNYEELCAKELSS
ATLNSIVAKHKELEGTSQASAEYQVLQIVSAMENYGIEWHSVRDSEGQKL
LIGVGPEGISICKDDFSPINRIAYPVVQMATQSGKNVYLTVTKESGNSIV
LLFKMISTRAASGLYRAITETHAFYRCDTVTSAVMMQYSRDLKGHLASLF
LNENINLGKKYVFDIKRTSKEVYDHARRALYNAGVVDLVSRNNQSPSHSP
LKSSESSMNCSSCEGLSCQQTRVLQEKLRKLKEAMLCMVCCEEEINSTFC
PCGHTVCCESCAAQLQSCPVCRSRVEHVQHVYLPTHTSLLNLTVI
LDL-R Amino Acid Sequence

(SEQ ID NO: 1805)

AVGDRCERNEFQCQDGKCISYKWVCDGSAECQDGSDESQETCLSVTCKSG
DFSCGGRVNRCIPQFWRCDGQVDCDNGSDEQGCPPKTCSQDEFRCHDGKC
ISRQFVCDSDRDCLDGSDEASCPVLTCGPASFQCNSSTCIPQLWACDNDP
DCEDGSDEWPQRCRGLYVFQGDSSPCSAFEFHCLSGECIHSSWRCDGGPD
CKDKSDEENCAVATCRPDEFQCSDGNCIHGSRQCDREYDCKDMSDEVGCV
NVTLCEGPNKFKCHSGECITLDKVCNMARDCRDWSDEPIKECGTNECLDN
NGGCSHVCNDLKIGYECLCPDGFQLVAQRRCEDIDECQDPDTCSQLCVNL
EGGYKCQCEEGFQLDPHTKACKAVGSIAYLFFTNRHEVRKMTLDRSEYTS
LIPNLRNVVALDTEVASNRIYWSDLSQRMICSTQLDRAHGVSSYDTVISR
DIQAPDGLAVDWIHSNIYWTDSVLGTVSVADTKGVKRKTLFRENGSKPRA
IVVDPVHGFMYWTDWGTPAKIKKGGLNGVDIYSLVTENIQWPNGITLDLL
SGRLYWVDSKLHSISSIDVNGGNRKTILEDEKRLAHPFSLAVFEDKVFWT
DIINEAIFSANRLTGSDVNLLAENLLSPEDMVLFHNLTQPRGVNWCERTT
LSNGGCQYLCLPAPQINPHSPKFTCACPDGMLLARDMRSCLTEAEAAVAT
QETSTVRLKVSSTAVRTQHTTTRPVPDTSRLPGATPGLTTVEIVTMSHQA
LGDVAGRGNEKKPSSVRALSIVLPIVLLVFLCLGVFLLWKNWRLKNINSI
NFDNPVYQKTTEDEVHICHNQDGYSYPSRQMVSLEDDVA

[0153] Loss-of-function mutations that may be made in APOC3 gene using the nucleobased editors described herein are also provided. The strategies to generate loss-of-function mutation are similar to that used for PCSK9 (e.g., premature stop codons, destabilizing mutations, altering splicing, etc.) APOC3 mutations and guide RNA sequences are listed in Tables 14-16.

TABLE 14
Exemplary APOC3 Protective Loss-of-Function Mutations via Codon Change
and Premature STOP Codons

| | | Location | | | | | |
|---|---|---|---|---|---|---|---|
| Residue | Codon | of | | | gRNA size | | SEG |
| Change | Change | mutation | guide sequence | (PAM) | (C edited) | BE type^{a} | ID NOs |
| A43T | GCC | ACC | UGCAUCCUUGGCGGUCUUGG | (TGG) | 20 (C12) | SpBE3 | 1806-1809 |
| | | | AUCCUUGGCGGUCUUGGUGG | (CGTG) | 20 (C9) | VQR-SpBE3 | |
| | | | GCAUCCUUGGCGGUCUUGGU | (GGCG) | 20 (C11) | VRER-SpBE3 | |
| | | | UGCAUCCUUGGCGGUCUUGG | (TGGCG) | 20 (C12) | St3BE3 | |
| R19X | CGA | TGA | CUCUGCCCGUAAGCACUUGG | (TGG) | 20 (C8) | SpBE3 | 1810-1816 |
| | | | GGCCUCUGCCCGUAAGCACU | (TGGTG) | 20 (C11) | St3BE3 | |
| | | | CUGGCCUCUGCCCGUAAGCA | (CTTGGT) | 20 (C13) | KKH-SaBE3 | |
| | | | UCUGCCCGUAAGCACUUGGU | (GGG) | 20 (C7) | SpBE3 | |
| | | | CUGCCCGUAAGCACUUGGUG | (GGAC) | 20 (C6) | VQR-SpBE3 | |
| | | | GCCUCUGCCCGUAAGCACUU | (GGTG) | 20 (C10) | VQR-SpBE3 | |
| | | | GGCCUCUGCCCGUAAGCACU | (TGG) | 20 (C11) | SpBE3 | |
| W62X | TGG | TAG, TGA, | CAGCCCCUAAAUCAGUCAGG | (GGAA) | 20 (C1/−1) | VQR-SpBE3 | 1817-1824 |
| | | or TAA | CCAGCCCCUAAAUCAGUCAG | (GGG) | 20 (C1/2) | SpBE3 | |
| | | | CCCAGCCCCUAAAUCAGUCA | (GGG) | 20 (C2/3) | SpBE3 | |
| | | | ACCCAGCCCCUAAAUCAGUC | (AGG) | 20 (C3/4) | SpBE3 | |
| | | | CACCCAGCCCCUAAAUCAGU | (CAG) | 20 (C4/5) | SpBE3 | |
| | | | CGGUCACCCAGCCCCUAAAU | (CAG) | 20 (C8/9) | SpBE3 | |
| | | | AUCGGUCACCCAGCCCCUAA | (ATCAGT) | 20 (C11/12) | KKH-SaBE3 | |
| | | | ACCCAGCCCCUAAAUCAGUC | (AGGGG) | 20 (C3/4) | St3BE3 | |
| W74X | TGG | TAG, TGA, | AGUAGUCUUUCAGGGAACUG | (AAG) | 20 (C−1/−2) | SpBE3 | 1825-1830 |
| | | or TAA | CCAGUAGUCUUUCAGGGAAC | (TGAA) | 20 (C1/2) | VQR-SpBE3 | |
| | | | GUGCUCCAGUAGUCUUUCAG | (GGAA) | 20 (C6/7) | VQR-SpBE3 | |
| | | | GGUGCUCCAGUAGUCUUUCA | (GGG) | 20 (C7/8) | SpBE3 | |
| | | | CGGUGCUCCAGUAGUCUUUC | (AGG) | 20 (C8/9) | SpBE3 | |
| | | | ACGGUGCUCCAGUAGUCUUU | (CAG) | 20 (C9/10) | SpBE3 | |
| W85X | TGG | TAG, TGA, | GUCCAAAUCCCAGAACUCAG | (AGAA) | 20 (C10/11) | VQR-SpBE3 | 1831-1832 |
| | | or TAA | GGGUCCAAAUCCCAGAACUC | (AGAGAAC) | 20 (C12/13) | St1BE3 | |
| Q2 | CAG | TAG | CAGAGGUGCCAUGCAGCCCC | (GGG) | 20 (C14) | SpBE3 | 1833 |
| Q33 | CAG | TAG | CAGCUUCAUGCAGGGUUACA | (TGAA) | 20 (C11) | VQR-SpBE3 | 1834-1835 |
| | | | GCUUCAUGCAGGGUUACAUG | (AAG) | 20 (C9) | SpBE3 | |
| Q51 | CAG | TAG | UGAGCAGCGUGCAGGAGUCC | (CAG) | 20 (C12) | SpBE3 | 1836-1842 |
| | | | GAGCAGCGUGCAGGAGUCCC | (AGG) | 20 (C11) | SpBE3 | |
| | | | AGCAGCGUGCAGGAGUCCCA | (GGTG) | 20 (C10) | VQR-SpBE3 | |
| | | | CAGCGUGCAGGAGUCCCAGG | (TGG) | 20 (C8) | SpBE3 | |
| | | | UGCAGGAGUCCCAGGUGGCC | (CAG) | 20 (C3) | SpBE3 | |
| | | | CUGAGCAGCGUGCAGGAGUC | (CCAGGT) | 20 (C13) | KKH-SaBE3 | |
| | | | GAGCAGCGUGCAGGAGUCCC | (AGGTG) | 20 (C11) | St3BE3 | |
| Q54 and | CAG | TAG | AGGAGUCCCAGGUGGCCCAG | (CAG) | 20 (C9/−1) | SpBE3 | 1843-1847 |
| Q57 | | | GGAGUCCCAGGUGGCCCAGC | (AGG) | 20 (C8) | SpBE3 | |
| | | | UCCCAGGUGGCCCAGCAGGC | (CAG) | 20 (C4/13) | SpBE3 | |
| | | | CCCAGGUGGCCCAGCAGGCC | (AGG) | 20 (C3/12) | SpBE3 | |
| | | | GUCCCAGGUGGCCCAGCAGG | (CCAGGT) | 20 (C5) | KKH-SaBE3 | |
| Q58 | CAG | TAG | AGCAGGCCAGGUACACCCGC | (TGG) | 20 (C3) | SpBE3 | 1848 |
| P89US | CCT | TCT, CTT, | UGGGAUUUGGACCCUGAGGU | (CAG) | 20 (C13/14) | SpBE3 | 1849-1851 |
| | | or TTT | GGGAUUUGGACCCUGAGGUC | (AGAC) | 20 (C12/13) | VQR-SpBE3 | |
| | | | CCCUGAGGUCAGACCAACUU | (CAG) | 20 (C2/3) | SpBE3 | |
| P93L/S | CCA | TCA, CTA, | GAGGUCAGACCAACUUCAGC | (CGTG) | 20 (C10/11) | VQR-SpBE3 | 1852-1853 |
| | | or TTA | GGUCAGACCAACUUCAGCCG | (TGG) | 20 (C8/9) | SpBE3 | |
| M1I | ATG | ATA | AUGGCACCUCUGUUCCUGCA | (AGG) | 20 (C−1) | SpBE3 | 1854-1855 |
| | | | CAUGGCACCUCUGUUCCUGC | (AAG) | 20 (C1) | SpBE3 | |

*Guide sequences (the portion of the guide RNA that targets the nucleobase editor to the target sequence) are provided, which may be used with any tracrRNA framework sequences provided herein to generate the full guide RNA sequence
^{a}BE types: SpBE3 = APOBEC1-SpCas9n-UGI; VQR-SpBE3 = APOBEC1-VQR-SpCas9n-UGI; EQR-SpBE3 = APOBEC1-EQR-SpCas9n-UGI; VRER-SpBE3 = APOBEC1-VRER-SpCas9n-UGI; SaBE3 = APOBEC1-SaCas9n-UGI; KKH-SaBE3 = APOBEC1-KKH-SaCas9n-UGI; St3BE3 = APOBEC1-St3Cas9n-UGI; St1BE3 = APOBEC1-St1Cas9n-UGI.

TABLE 15
Alteration of Intron/Exon Junctions in APOC3 Gene via Base Editing

| | | | | | | Guide |
|---|---|---|---|---|---|---|
| Target | Genome target | | | gRNA size | | RNA SEQ |
| site | sequence | guide sequence | (PAM) | (C edited) | BE type^{a} | ID NO |
| Intron 1 | GCTCAGTTCATCCCTA | CCUGGAGCAGCUGCCUCUAG | (GGAT) | 20 (C1/2) | VQR-SpBE3 | 1856-1860 |
| donor | GAGGCAGCTGCTCCAG | ACCUGGAGCAGCUGCCUCUA | (GGG) | 20 (C2/3) | SpBE3 | |
| site | gtaatgcc (SEQ ID | UACCUGGAGCAGCUGCCUCU | (AGG) | 20 (C3/4) | SpBE3 | |
| | NO: 1907) | UUACCUGGAGCAGCUGCCUC | (TAG) | 20 (C4/5) | SpBE3 | |
| | | UACCUGGAGCAGCUGCCUCU | (AGGGAT) | 20 (C3/4) | SaBE3 | |
| Intron 1 | caggacacttccttgc | CUGCAAGGAAGUGUCCUGUG | (AGG) | 20 (C1/−1) | SpBE3 | 1861-1869 |
| acceptor | agGAACAGAGGTGCCA | CCUGCAAGGAAGUGUCCUGU | (GAG) | 20 (C1/2) | SpBE3 | |
| site | TGCA (SEQ ID | GUUCCUGCAAGGAAGUGUCC | (TGTG) | 20 (C4/5) | VQR-SpBE3 | |
| | NO: 1908) | CUGCAAGGAAGUGUCCUGUG | (AGGGG) | 20 (C1/−1) | St3BE3 | |
| | | GACACUUCCUUGCAGGAACA | (GAG) | 20 (C13) | SpBE3 | |
| | | ACACUUCCUUGCAGGAACAG | (AGG) | 20 (C12) | SpBE3 | |
| | | CACUUCCUUGCAGGAACAGA | (GGTG) | 20 (C10) | VQR-SpBE3 | |
| | | GCAGGAACAGAGGUGCCAUG | (CAG) | 20 (C2) | SpBE3 | |
| | | ACACUUCCUUGCAGGAACAG | (AGGTG) | 20 (C12) | St3BE3 | |
| Intron 2 | GGCGCTCCTGGCCTCT | GGGCAGAGGCCAGGAGCGCC | (AGG) | 20 (C−1) | SpBE3 | 1870-1878 |
| donor | GCCCgtaagcacttgg | CGGGCAGAGGCCAGGAGCGC | (CAG) | 20 (C1) | SpBE3 | |
| site | tgggact (SEQ ID | GCUUACGGGCAGAGGCCAGG | (AGCG) | 20 (C6) | VRER-SpBE3 | |
| | NO: 1909) | UGCUUACGGGCAGAGGCCAG | (GAG) | 20 (C7) | SpBE3 | |
| | | GUGCUUACGGGCAGAGGCCA | (GGAG) | 20 (C8) | EQR-SpBE3 | |
| | | AGUGCUUACGGGCAGAGGCC | (AGG) | 20 (C9) | SpBE3 | |
| | | AAGUGCUUACGGGCAGAGGC | (CAG) | 20 (C10) | SpBE3 | |
| | | GGGCAGAGGCCAGGAGCGCC | (AGGAG) | 20 (C−1) | St3BE3 | |
| | | AGUGCUUACGGGCAGAGGCC | (AGGAG) | 20 (C9) | St3BE3 | |
| Intron 2 | cagccctgctctttcc | CUGAGGAAAGAGCAGGGCUG | (AGTG) | 20 (C1/−1) | VQR-SpBE3 | 1879-1894 |
| acceptor | tcagGAGCTTCAGAGG | CCUGAGGAAAGAGCAGGGCU | (GAG) | 20 (C1/2) | SpBE3 | |
| site | CCGAGGATGCCTC | AAGCUCCUGAGGAAAGAGCA | (GGG) | 20 (C6/7) | SpBE3 | |
| | (SEQ ID NO: | GAAGCUCCUGAGGAAAGAGC | (AGG) | 20 (C7/8) | SpBE3 | |
| | 1910) | UGAAGCUCCUGAGGAAAGAG | (CAG) | 20 (C8/9) | SpBE3 | |
| | | CUCUGAAGCUCCUGAGGAAA | (GAG) | 20 (C11/12) | SpBE3 | |
| | | CUCCUGAGGAAAGAGCAGGG | (CTGAGT) | 20 (C3/4) | SaBE3 | |
| | | UGCUCUUUCCUCAGGAGCUU | (CAG) | 20 (C12) | SpBE3 | |
| | | GCUCUUUCCUCAGGAGCUUC | (AGAG) | 20 (C11/12) | EQR-SpBE3 | |
| | | CUCUUUCCUCAGGAGCUUCA | (GAG) | 20 (C10) | SpBE3 | |
| | | UCUUUCCUCAGGAGCUUCAG | (AGG) | 20 (C9) | SpBE3 | |
| | | UCCUCAGGAGCUUCAGAGGC | (CGAG) | 20 (C5) | EQR-SpBE3 | |
| | | CCUCAGGAGCUUCAGAGGCC | (GAG) | 20 (C4) | SpBE3 | |
| | | CUCAGGAGCUUCAGAGGCCG | (AGG) | 20 (C3) | SpBE3 | |
| | | UCAGGAGCUUCAGAGGCCGA | (GGAT) | 20 (C2) | VQR-SpBE3 | |
| | | CCUCAGGAGCUUCAGAGGCC | (GAGGAT) | 20 (C4) | SaBE3 | |
| Intron 3 | CAGGTGGCCCAGCAGG | CUGGCCUGCUGGGCCACCUG | (GGAC) | 20 (C1/−1) | VQR-SpBE3 | 1895-1899 |
| donor | CCAGgtacacccgctg | CCUGGCCUGCUGGGCCACCU | (GGG) | 20 (C1/2) | SpBE3 | |
| site | gcctccctcc (SEQ | ACCUGGCCUGCUGGGCCACC | (TGG) | 20 (C2/3) | SpBE3 | |
| | ID NO: 1911) | GCGGGUGUACCUGGCCUGCU | (GGG) | 20 (C10/11) | SpBE3 | |
| | | AGCGGGUGUACCUGGCCUGC | (TGG) | 20 (C11/12) | SpBE3 | |
| Intron 3 | cccctgactgatttag | GCCCCUAAAUCAGUCAGGGG | (AAG) | 20 (C4/5) | SpBE3 | 1900-1906 |
| acceptor | GGGCTGGGTGACCGA | CAGCCCCUAAAUCAGUCAGG | (GGAA) | 20 (C6/7) | VQR-SpBE3 | |
| site | (SEQ ID NO: | CCAGCCCCUAAAUCAGUCAG | (GGG) | 20 (C7/8) | SpBE3 | |
| | 1912) | CCCAGCCCCUAAAUCAGUCA | (GGG) | 20 (C8/9) | SpBE3 | |
| | | ACCCAGCCCCUAAAUCAGUC | (AGG) | 20 (C9/10) | SpBE3 | |
| | | CACCCAGCCCCUAAAUCAGU | (CAG) | 20 (C10/11) | SpBE3 | |
| | | ACCCAGCCCCUAAAUCAGUC | (AGGGG) | 20 (C9/10) | St3BE3 | |

*Guide sequences (the portion of the guide RNA that targets the nucleobase editor to the target sequence) are provided, which may be used with any tracrRNA framework sequences provided herein to generate the full guide RNA sequence
^{a}BE types: SpBE3 = APOBEC1-SpCas9n-UGI; VQR-SpBE3 = APOBEC1-VQR-SpCas9n-UGI; EQR-SpBE3 = APOBEC1-EQR-SpCas9n-UGI; VRER-SpBE3 = APOBEC1-VRER-SpCas9n-UGI; SaBE3 = APOBEC1-SaCas9n-UGI; KKH-SaBE3 = APOBEC1-KKH-SaCas9n-UGI; St3BE3 = APOBEC1-St3Cas9n-UGI; St1BE3 = APOBEC1-St1Cas9n-UGI.

TABLE 16
Efficiency and Specificity Scores for gRNAs for APOC3 Protective Loss-of-Function Mutations via Codon Change. The
guidesequences correspond to SEQ ID NOs: 1913-1987 from top to bottom.

| | | | | gRNA size | | | | | | | | | Prox/ | |
|---|---|---|---|---|---|---|---|---|---|---|---|---|---|---|
| Target variants | BE type^{a} | guidesequence | PAM | (C edited) | Eff^{b} | Hsu^{c} | Fusi | Chari | Doench | Wang | M.-M. | Housden | GC | Off-targets^{d} |
| Intron 2 donor | VRER-SpBE3 | GCUUACGGGCAGAGGCCAGG | (AGCG) | 20 (C6) | 8.5 | 88 | −1 | 99 | 19 | 79 | 49 | 8 | +GG | 0-0-1-2- |
| | | | | | | | | | | | | | | 16 |
| P93L/S | SpBE3 | GGUCAGACCAACUUCAGCCG | (TGG) | 20 (C8/9) | 6.5 | 91 | 65 | 78 | 81 | 94 | 39 | 6 | + | 0-0-0-6- |
| | | | | | | | | | | | | | | 38 |
| W85X | St1BE3 | GGGUCCAAAUCCCAGAACUC | (AGAGAAC) | 20 (C12/13) | 4.5 | 96 | −1 | 86 | 10 | 60 | 34 | 4 | − | 0-0-0-1- |
| | | | | | | | | | | | | | | 18 |
| Intron 1 acceptor | St3BE3 | ACACUUCCUUGCAGGAACAG | (AGGTG) | 20 (C12) | 4.3 | 88 | 66 | 93 | 72 | 79 | 47 | 4 | − | 0-0-1-1- |
| | | | | | | | | | | | | | | 39 |
| W62X | KKH-SaBE3 | AUCGGUCACCCAGCCCCUAA | (ATCAGT) | 20 (C11/12) | 7.4 | 97 | −1 | 81 | 8 | 41 | 55 | 7 | − | 0-0-0-0- |
| | | | | | | | | | | | | | | 15 |
| P93L/S | VQR-SpBE3 | GAGGUCAGACCAACUUCAGC | (CGTG) | 20 (C10/11) | 5.9 | 99 | −1 | 64 | 11 | 77 | −2 | 5 | − | 0-0-0-0-8 |
| Intron 2 acceptor | SaBE3 | CUCCUGAGGAAAGAGCAGGG | (CTGAGT) | 20 (C3/4) | 5.9 | 78 | −1 | 98 | 14 | 76 | 62 | 5 | +GG | 0-0-0- |
| | | | | | | | | | | | | | | 12-116 |
| Q51 | KKH-SaBE3 | CUGAGCAGCGUGCAGGAGUC | (CCAGGT) | 20 (C13) | 5.0 | 94 | −1 | 36 | 2 | 19 | 77 | 5 | + | 0-0-0-1- |
| | | | | | | | | | | | | | | 28 |
| Intron 1 acceptor | St3BE3 | CUGCAAGGAAGUGUCCUGUG | (AGGGG) | 20 (C1/−1) | 7.6 | 87 | 62 | 83 | 5 | 39 | 84 | 7 | + | 0-0-0-3- |
| | | | | | | | | | | | | | | 46 |
| A43T | St3BE3 | UGCAUCCUUGGCGGUCUUGG | (TGGCG) | 20 (C12) | 5.3 | 92 | 45 | 76 | 5 | 45 | 54 | 5 | −GG | 0-0-0-6- |
| | | | | | | | | | | | | | | 28 |
| Q51 | VQR-SpBE3 | AGCAGCGUGCAGGAGUCCCA | (GGTG) | 20 (C10) | 9.1 | 98 | −1 | 70 | 31 | 62 | 58 | 9 | + | 0-0-0-1- |
| | | | | | | | | | | | | | | 11 |
| Intron 1 acceptor | VQR-SpBE3 | CACUUCCUUGCAGGAACAGA | (GGTG) | 20 (C10) | 4.5 | 95 | −1 | 73 | 9 | 53 | 42 | 4 | − | 0-0-0-5-7 |
| W62X | VQR-SpBE3 | CAGCCCCUAAAUCAGUCAGG | (GGAA) | 20 (C1/−1) | 5.7 | 74 | −1 | 91 | 66 | 70 | 62 | 5 | +GG | 0-0-1- |
| | | | | | | | | | | | | | | 14-130 |
| Q58 | SpBE3 | AGCAGGCCAGGUACACCCGC | (TGG) | 20 (C3) | 4.3 | 87 | 54 | 50 | 15 | 78 | 41 | 4 | + | 0-0-0- |
| | | | | | | | | | | | | | | 14-142 |
| Intron 3 acceptor | VQR-SpBE3 | CAGCCCCUAAAUCAGUCAGG | (GGAA) | 20 (C6/7) | 5.7 | 74 | −1 | 91 | 66 | 70 | 62 | 5 | +GG | 0-0-1- |
| | | | | | | | | | | | | | | 14-130 |
| A43T | VQR-SpBE3 | AUCCUUGGCGGUCUUGGUGG | (CGTG) | 20 (C9) | 6.3 | 100 | −1 | 40 | 7 | 63 | 64 | 6 | +GG | 0-0-0-0-5 |
| R19X | VQR-SpBE3 | CUGCCCGUAAGCACUUGGUG | (GGAC) | 20 (C6) | 4.7 | 92 | −1 | 62 | 29 | 58 | 72 | 4 | − | 0-0-0-1- |
| | | | | | | | | | | | | | | 45 |
| Q51 | St3BE3 | GAGCAGCGUGCAGGAGUCCC | (AGGTG) | 20 (C11) | 4.3 | 83 | 51 | 80 | 7 | 56 | 72 | 4 | + | 0-0-1-4- |
| | | | | | | | | | | | | | | 68 |
| Q54 and Q57 | KKH-SaBE3 | GUCCCAGGUGGCCCAGCAGG | (CCAGGT) | 20 (C5) | 4.2 | 69 | −1 | 93 | 14 | 78 | 88 | 4 | +GG | 0-1-1-6- |
| | | | | | | | | | | | | | | 49 |
| R19X | KKH-SaBE3 | CUGGCCUCUGCCCGUAAGCA | (CTTGGT) | 20 (C13) | 3.4 | 98 | −1 | 32 | 5 | 50 | 59 | 3 | − | 0-0-0-4- |
| | | | | | | | | | | | | | | 27 |
| R19X | VQR-SpBE3 | GCCUCUGCCCGUAAGCACUU | (GGTG) | 20 (C10) | 6.3 | 100 | −1 | 57 | 15 | 46 | 38 | 6 | − | 0-0-0-0-4 |
| Intron 1 acceptor | VQR-SpBE3 | GUUCCUGCAAGGAAGUGUCC | (TGTG) | 20 (C4/5) | 4.6 | 99 | −1 | 27 | 9 | 58 | 21 | 4 | + | 0-0-0-0-9 |
| Intron 2 donor | St3BE3 | AGUGCUUACGGGCAGAGGCC | (AGGAG) | 20 (C9) | 4.8 | 87 | 47 | 65 | 16 | 69 | 46 | 4 | + | 0-0-0-2- |
| | | | | | | | | | | | | | | 49 |
| Intron 2 donor | St3BE3 | GGGCAGAGGCCAGGAGCGCC | (AGGAG) | 20 (C−1) | 7.5 | 76 | 40 | 79 | 1 | 57 | 70 | 7 | + | 0-0-0- |
| | | | | | | | | | | | | | | 26-196 |
| W62X | St3BE3 | ACCCAGCCCCUAAAUCAGUC | (AGGGG) | 20 (C3/4) | 5.1 | 98 | 45 | 56 | 4 | 35 | 13 | 5 | − | 0-0-0-2- |
| | | | | | | | | | | | | | | 11 |
| Intron 3 acceptor | St3BE3 | ACCCAGCCCCUAAAUCAGUC | (AGGGG) | 20 (C9/10) | 5.1 | 98 | 45 | 56 | 4 | 35 | 13 | 5 | − | 0-0-0-2- |
| | | | | | | | | | | | | | | 11 |
| A43T | SpBE3 | UGCAUCCUUGGCGGUCUUGG | (TGG) | 20 (C12) | 5.3 | 75 | 45 | 76 | 5 | 45 | 54 | 5 | −GG | 0-0-0 |
| | | | | | | | | | | | | | | 12-115 |
| A43T | VRER-SpBE3 | GCAUCCUUGGCGGUCUUGGU | (GGCG) | 20 (C11) | 7.3 | 97 | −1 | 47 | 18 | 54 | 39 | 7 | − | 0-0-0-1- |
| | | | | | | | | | | | | | | 10 |
| W62X | SpBE3 | CCAGCCCCUAAAUCAGUCAG | (GGG) | 20 (C1/2) | 4.8 | 69 | 70 | 79 | 58 | 82 | 70 | 4 | − | 0-0-1- |
| | | | | | | | | | | | | | | 13-128 |
| Intron 3 acceptor | SpBE3 | CCAGCCCCUAAAUCAGUCAG | (GGG) | 20 (C7/8) | 4.8 | 69 | 70 | 79 | 58 | 82 | 70 | 4 | − | 0-0-1- |
| | | | | | | | | | | | | | | 13-128 |
| Intron 1 acceptor | SpBE3 | ACACUUCCUUGCAGGAACAG | (AGG) | 20 (C12) | 4.3 | 57 | 66 | 93 | 72 | 79 | 47 | 4 | − | 0-0-4- |
| | | | | | | | | | | | | | | 27-191 |
| R19X | SpBE3 | CUCUGCCCGUAAGCACUUGG | (TGG) | 20 (C8) | 6.7 | 84 | 44 | 65 | 7 | 47 | 45 | 6 | −GG | 0-0-0-9- |
| | | | | | | | | | | | | | | 70 |
| R19X | SpBE3 | UCUGCCCGUAAGCACUUGGU | (GGG) | 20 (C7) | 5.6 | 85 | 58 | 61 | 30 | 59 | 48 | 5 | − | 0-0-0-5- |
| | | | | | | | | | | | | | | 56 |
| W74X | VQR-SpBE3 | GUGCUCCAGUAGUCUUUCAG | (GGAA) | 20 (C6/7) | 5.6 | 75 | −1 | 63 | 48 | 71 | 65 | 5 | − | 0-0-0- |
| | | | | | | | | | | | | | | 10-107 |
| Q51 | SpBE3 | CAGCGUGCAGGAGUCCCAGG | (TGG) | 20 (C8) | 7.2 | 49 | 68 | 95 | 22 | 74 | 82 | 7 | +GG | 0-0-6- |
| | | | | | | | | | | | | | | 32-258 |
| R19X | St3BE3 | GGCCUCUGCCCGUAAGCACU | (TGGTG) | 20 (C11) | 5.6 | 97 | 45 | 14 | 13 | 34 | 36 | 5 | − | 0-0-0-0- |
| | | | | | | | | | | | | | | 28 |
| W74X | SpBE3 | GGUGCUCCAGUAGUCUUUCA | (GGG) | 20 (C7/8) | 7.1 | 75 | 55 | 67 | 25 | 47 | 37 | 7 | − | 0-0-3-8- |
| | | | | | | | | | | | | | | 88 |
| Q51 | SpBE3 | GAGCAGCGUGCAGGAGUCCC | (AGG) | 20 (C11) | 4.3 | 62 | 51 | 80 | 7 | 56 | 72 | 4 | + | 0-0-4- |
| | | | | | | | | | | | | | | 17-237 |
| Intron 3 donor | SpBE3 | GCGGGUGUACCUGGCCUGCU | (GGG) | 20 (C10/11) | 7.9 | 59 | 47 | 50 | 9 | 31 | 83 | 7 | + | 0-0-0- |
| | | | | | | | | | | | | | | 18-130 |
| W74X | SpBE3 | ACGGUGCUCCAGUAGUCUUU | (CAG) | 20 (C9/10) | 7.4 | 92 | 35 | 8 | 17 | 34 | 49 | 7 | − | 0-0-0-2- |
| | | | | | | | | | | | | | | 40 |
| W85X | VQR-SpBE3 | GUCCAAAUCCCAGAACUCAG | (AGAA) | 20 (C10/11) | 6.1 | 44 | −1 | 97 | 69 | 73 | 28 | 6 | − | 0-0-2- |
| | | | | | | | | | | | | | | 44-375 |
| Q33 | VQR-SpBE3 | CAGCUUCAUGCAGGGUUACA | (TGAA) | 20 (C11) | 4.8 | 74 | −1 | 66 | 12 | 16 | 53 | 4 | − | 0-0-2-9- |
| | | | | | | | | | | | | | | 124 |
| Intron 1 acceptor | SpBE3 | CUGCAAGGAAGUGUCCUGUG | (AGG) | 20 (C1/−1) | 7.6 | 56 | 62 | 83 | 5 | 39 | 84 | 7 | + | 0-0-6- |
| | | | | | | | | | | | | | | 20-210 |
| P89L/S | VQR-SpBE3 | GGGAUUUGGACCCUGAGGUC | (AGAC) | 20 (C12/13) | 6.7 | 71 | −1 | 51 | 2 | 68 | 59 | 6 | + | 0-0-0- |
| | | | | | | | | | | | | | | 10-190 |
| W62X | SpBE3 | CGGUCACCCAGCCCCUAAAU | (CAG) | 20 (C8/9) | 4.6 | 82 | 44 | 11 | 19 | 38 | 56 | 4 | − | 0-0-1-4- |
| | | | | | | | | | | | | | | 69 |
| W62X | SpBE3 | ACCCAGCCCCUAAAUCAGUC | (AGG) | 20 (C3/4) | 5.1 | 81 | 45 | 56 | 4 | 35 | 13 | 5 | − | 0-0-2-9- |
| | | | | | | | | | | | | | | 96 |
| Intron 1 donor | SaBE3 | UACCUGGAGCAGCUGCCUCU | (AGGGAT) | 20 (C3/4) | 9.5 | 87 | 50 | 50 | 2 | 47 | 35 | 9 | + | 0-0-0-3- |
| | | | | | | | | | | | | | | 52 |
| Intron 3 acceptor | SpBE3 | ACCCAGCCCCUAAAUCAGUC | (AGG) | 20 (C9/10) | 5.1 | 81 | 45 | 56 | 4 | 35 | 13 | 5 | − | 0-0-2-9- |
| | | | | | | | | | | | | | | 96 |
| Intron 2 donor | EQR-SpBE3 | GUGCUUACGGGCAGAGGCCA | (GGAG) | 20 (C8) | 4.5 | 59 | −1 | 45 | 27 | 75 | 71 | 4 | + | 0-0-0- |
| | | | | | | | | | | | | | | 20-161 |
| Intron 2 acceptor | SpBE3 | GAAGCUCCUGAGGAAAGAGC | (AGG) | 20 (C7/8) | 4.7 | 42 | 52 | 58 | 19 | 91 | 31 | 4 | − | 0-0-4- |
| | | | | | | | | | | | | | | 45-382 |
| Intron 2 donor | SpBE3 | AGUGCUUACGGGCAGAGGCC | (AGG) | 20 (C9) | 4.8 | 63 | 47 | 65 | 16 | 69 | 46 | 4 | + | 0-0-0- |
| | | | | | | | | | | | | | | 16-158 |
| Intron 2 acceptor | SpBE3 | UCUUUCCUCAGGAGCUUCAG | (AGG) | 20 (C9) | 5.4 | 46 | 56 | 84 | 56 | 58 | 50 | 5 | − | 0-0-3- |
| | | | | | | | | | | | | | | 55-263 |
| Intron 3 donor | VQR-SpBE3 | CUGGCCUGCUGGGCCACCUG | (GGAC) | 20 (C1/−1) | 5.9 | 48 | −1 | 82 | 3 | 62 | 76 | 5 | + | 0-0-2- |
| | | | | | | | | | | | | | | 45-302 |
| R19X | SpBE3 | GGCCUCUGCCCGUAAGCACU | (TGG) | 20 (C11) | 5.6 | 82 | 45 | 14 | 13 | 34 | 36 | 5 | − | 0-0-1- |
| | | | | | | | | | | | | | | 12-105 |
| W62X | SpBE3 | CCCAGCCCCUAAAUCAGUCA | (GGG) | 20 (C2/3) | 7.0 | 66 | 59 | 36 | 18 | 61 | 42 | 7 | − | 0-0-3- |
| | | | | | | | | | | | | | | 23-153 |
| Intron 3 acceptor | SpBE3 | CCCAGCCCCUAAAUCAGUCA | (GGG) | 20 (C8/9) | 7.0 | 66 | 59 | 36 | 18 | 61 | 42 | 7 | − | 0-0-3- |
| | | | | | | | | | | | | | | 23-153 |
| Intron 3 acceptor | SpBE3 | CACCCAGCCCCUAAAUCAGU | (CAG) | 20 (C10/11) | 6.0 | 71 | 52 | 10 | 16 | 44 | 28 | 6 | − | 0-0-2- |
| | | | | | | | | | | | | | | 12-132 |
| M1I | SpBE3 | AUGGCACCUCUGUUCCUGCA | (AGG) | 20 (C−1) | 8.0 | 56 | 63 | 35 | 18 | 43 | 61 | 8 | + | 0-0-4- |
| | | | | | | | | | | | | | | 42-212 |
| Intron 1 donor | SpBE3 | ACCUGGAGCAGCUGCCUCUA | (GGG) | 20 (C2/3) | 4.4 | 43 | 46 | 76 | 8 | 34 | 63 | 4 | − | 0-1-5- |
| | | | | | | | | | | | | | | 40-232 |
| P89L/S | SpBE3 | CCCUGAGGUCAGACCAACUU | (CAG) | 20 (C2/3) | 6.8 | 62 | 54 | 16 | 22 | 36 | 56 | 6 | − | 0-0-3- |
| | | | | | | | | | | | | | | 22-198 |
| Intron 2 acceptor | SaBE3 | CCUCAGGAGCUUCAGAGGCC | (GAGGAT) | 20 (C4) | 7.9 | 69 | −1 | 44 | 6 | 49 | 48 | 7 | + | 0-1-1-6- |
| | | | | | | | | | | | | | | 66 |
| Intron 2 donor | SpBE3 | GGGCAGAGGCCAGGAGCGCC | (AGG) | 20 (C−1) | 7.5 | 36 | 40 | 79 | 1 | 57 | 70 | 7 | + | 0-0-15- |
| | | | | | | | | | | | | | | 70-641 |
| Q54 and Q57 | SpBE3 | GGAGUCCCAGGUGGCCCAGC | (AGG) | 20 (C8) | 5.9 | 42 | 46 | 71 | 10 | 68 | 57 | 5 | + | 0-0-1- |
| | | | | | | | | | | | | | | 50-378 |
| W74X | SpBE3 | CGGUGCUCCAGUAGUCUUUC | (AGG) | 20 (C8/9) | 5.1 | 81 | 13 | 1 | 1 | 13 | 31 | 5 | − | 0-0-1-6- |
| | | | | | | | | | | | | | | 64 |
| Intron 2 acceptor | SpBE3 | AAGCUCCUGAGGAAAGAGCA | (GGG) | 20 (C6/7) | 4.6 | 35 | 64 | 56 | 76 | 65 | 74 | 4 | − | 0-0-9- |
| | | | | | | | | | | | | | | 55-389 |
| Intron 1 donor | VQR-SpBE3 | CCUGGAGCAGCUGCCUCUAG | (GGAT) | 20 (C1/2) | 6.4 | 47 | −1 | 47 | 11 | 40 | 63 | 6 | − | 0-1-5- |
| | | | | | | | | | | | | | | 31-251 |
| W74X | VQR-SpBE3 | CCAGUAGUCUUUCAGGGAAC | (TGAA) | 20 (C1/2) | 5.5 | 63 | −1 | 5 | 9 | 42 | 41 | 5 | + | 0-0-2- |
| | | | | | | | | | | | | | | 17-150 |
| Intron 3 donor | SpBE3 | AGCGGGUGUACCUGGCCUGC | (TGG) | 20 (C11/12) | 4.4 | 60 | 31 | 33 | 1 | 44 | 17 | 4 | + | 0-0-0- |
| | | | | | | | | | | | | | | 16-131 |
| Q54 and Q57 | SpBE3 | UCCCAGGUGGCCCAGCAGGC | (CAG) | 20 (C4/13) | 4.5 | 24 | 37 | 78 | 3 | 42 | 44 | 4 | + | 0-2-5- |
| | | | | | | | | | | | | | | 55-501 |
| Intron 1 donor | SpBE3 | UUACCUGGAGCAGCUGCCUC | (TAG) | 20 (C4/5) | 4.6 | 31 | 29 | 68 | 4 | 35 | 41 | 4 | + | 0-1-3- |
| | | | | | | | | | | | | | | 56-283 |
| Intron 1 donor | SpBE3 | UACCUGGAGCAGCUGCCUCU | (AGG) | 20 (C3/4) | 9.5 | 35 | 50 | 50 | 2 | 47 | 35 | 9 | + | 0-0-14- |
| | | | | | | | | | | | | | | 36-265 |
| Q54 and Q57 | SpBE3 | CCCAGGUGGCCCAGCAGGCC | (AGG) | 20 (C3/12) | 7.1 | 27 | 38 | 41 | 0 | 41 | 54 | 7 | + | 0-1-10- |
| | | | | | | | | | | | | | | 104-583 |
| Intron 3 donor | SpBE3 | ACCUGGCCUGCUGGGCCACC | (TGG) | 20 (C2/3) | 5.6 | 40 | 24 | 39 | 2 | 20 | 37 | 5 | + | 0-0-10- |
| | | | | | | | | | | | | | | 41-318 |
| Intron 2 acceptor | EQR-SpBE3 | UCCUCAGGAGCUUCAGAGGC | (CGAG) | 20 (C5) | 3.5 | 39 | −1 | 22 | 6 | 37 | 37 | 3 | + | 0-0-4- |
| | | | | | | | | | | | | | | 52-319 |
| Intron 2 acceptor | EQR-SpBE3 | GCUCUUUCCUCAGGAGCUUC | (AGAG) | 20 (C11/12) | 4.6 | 42 | −1 | 24 | 6 | 22 | 30 | 4 | − | 0-1-4- |
| | | | | | | | | | | | | | | 27-243 |

*Guide sequences (the portion of the guide RNA that targets the nucleobase editor to the target sequence) are provided, which may be used with any tracrRNA framework sequences provided herein to generate the full guide RNA sequence

[0154] In some embodiments, simultaneous introduction of loss-of-function mutations into more than one protein factors in the LDL-mediated cholesterol clearance pathway are provided. For example, in some embodiments, a loss-of-function mutation may be simultaneously introduced into PCSK9 and APOC3. In some embodiments, a loss-of-function mutation may be simultaneously introduced into PCSK9 and LDL-R. In some embodiments, a loss-of-function mutation may be simultaneously introduced into PCSK9 and IODL. In some embodiments, a loss-of-function mutation may be simultaneously introduced into APOC3 and IODL. In some embodiments, a loss-of-function mutation may be simultaneously introduced into LDL-R and APOC3. In some embodiments, a loss-of-function mutation may be simultaneously introduced into LDL-R and IDOL. In some embodiments, a loss-of-function mutation may be simultaneously introduced into PCSK9, APOC3, LDL-R and IDOL. To simultaneous introduce of loss-of-function mutations into more than one protein, multiple guide nucleotide sequences are used.

[0155] Further provided herein are methods for the generation of novel and uncharacterized mutations in any of the protein factors involved in the LDL-R mediated cholesterol clearance pathway described herein. For example, libraries of guide nucleotide sequences may be designed for all possible PAM sequences in the genomic site of these protein factors, and used to generate mutations in these proteins. The function of the protein variants may be evaluated. If a loss-of-function variant is identified, the specific gRNA used for making the mutation may be identified via sequencing of the edited genomic site, e.g., via DNA deep sequencing.

### Nucleobase Editors

[0156] The methods of generating loss-of-function PCSK9 variants described herein, are enabled by the use of the nucleobase editors. As described herein, a nucleobase editor is a fusion protein comprising: (i) a programmable DNA binding protein domain; and (ii) a deaminase domain. It is to be understood that any programmable DNA binding domain may be used in the based editors.

[0157] In some embodiments, the programmable DNA binding protein domain comprises the DNA binding domain of a zinc finger nuclease (ZFN) or a transcription activator-like effector domain (TALE). In some embodiments, the programmable DNA binding protein domain may be programmed by a guide nucleotide sequence, and is thus referred as a “guide nucleotide sequence-programmable DNA binding-protein domain.” In some embodiments, the guide nucleotide sequence-programmable DNA binding protein is a nuclease inactive Cas9, or dCas9. A dCas9 as used herein, encompasses a Cas9 that is completely inactive in its nuclease activity, or partially inactive in its nuclease activity (e.g., a Cas9 nickase). Thus, in some embodiments, the guide nucleotide sequence-programmable DNA binding protein is a Cas9 nickase. In some embodiments, the guide nucleotide sequence-programmable DNA binding protein is a nuclease inactive Cpf1. In some embodiments, the guide nucleotide sequence-programmable DNA binding protein is a nuclease inactive Argonaute.

[0158] In some embodiments, the guide nucleotide sequence-programmable DNA binding protein is a dCas9 domain. In some embodiments, the guide nucleotide sequence-programmable DNA binding protein is a Cas9 nickase. In some embodiments, the dCas9 domain comprises the amino acid sequence of SEQ ID NO: 2 or SEQ ID NO: 3. In some embodiments, the dCas9 domain comprises an amino acid sequence that is at least 60%, at least 65%, at least 70%, at least 75%, at least 80%, at least 85%, at least 90%, at least 91%, at least 92%, at least 93%, at least 94%, at least 95%, at least 96%, at least 97%, at least 98%, at least 99%, or at least 99.5% identical to any one of the Cas9 domains provided herein (e.g., SEQ ID NOs: 11-260), and comprises mutations corresponding to D10X (X is any amino acid except for D) and/or H840X (X is any amino acid except for H) in SEQ ID NO: 1. In some embodiments, the dCas9 domain comprises an amino acid sequence that is at least 60%, at least 65%, at least 70%, at least 75%, at least 80%, at least 85%, at least 90%, at least 91%, at least 92%, at least 93%, at least 94%, at least 95%, at least 96%, at least 97%, at least 98%, at least 99%, or at least 99.5% identical to any one of the Cas9 domains provided herein (e.g., SEQ ID NOs: 11-260), and comprises mutations corresponding to D10A and/or H840A in SEQ ID NO: 1. In some embodiments, the Cas9 nickase comprises an amino acid sequence that is at least 60%, at least 65%, at least 70%, at least 75%, at least 80%, at least 85%, at least 90%, at least 91%, at least 92%, at least 93%, at least 94%, at least 95%, at least 96%, at least 97%, at least 98%, at least 99%, or at least 99.5% identical to any one of the Cas9 domains provided herein (e.g., SEQ ID NOs: 11-260), and comprises mutations corresponding to D10X (X is any amino acid except for D) in SEQ ID NO: 1 and a histidine at a position correspond to position 840 in SEQ ID NO: 1. In some embodiments, the Cas9 nickase comprises an amino acid sequence that is at least 60%, at least 65%, at least 70%, at least 75%, at least 80%, at least 85%, at least 90%, at least 91%, at least 92%, at least 93%, at least 94%, at least 95%, at least 96%, at least 97%, at least 98%, at least 99%, or at least 99.5% identical to any one of the Cas9 domains provided herein (e.g., SEQ ID NOs: 11-260), and comprises mutations corresponding to D10A in SEQ ID NO: 1 and a histidine at a position correspond to position 840 in SEQ ID NO: 1. In some embodiments, variants or homologues of dCas9 or Cas9 nickase (e.g., variants of SEQ ID NO: 2 or SEQ ID NO: 3, respectively) are provided which are at least about 70% identical, at least about 80% identical, at least about 90% identical, at least about 95% identical, at least about 98% identical, at least about 99% identical, at least about 99.5% identical, or at least about 99.9% to SEQ ID NO: 2 or SEQ ID NO: 3, respectively, and comprises mutations corresponding to D10A and/or H840A in SEQ ID NO: 1. In some embodiments, variants of Cas9 (e.g., variants of SEQ ID NO: 2) are provided having amino acid sequences which are shorter, or longer than SEQ ID NO: 2, by about 5 amino acids, by about 10 amino acids, by about 15 amino acids, by about 20 amino acids, by about 25 amino acids, by about 30 amino acids, by about 40 amino acids, by about 50 amino acids, by about 75 amino acids, by about 100 amino acids, or more, provided that the dCas9 variants comprise mutations corresponding to D10A and/or H840A in SEQ ID NO: 1. In some embodiments, variants of Cas9 nickase (e.g., variants of SEQ ID NO: 3) are provided having amino acid sequences which are shorter, or longer than SEQ ID NO: 3, by about 5 amino acids, by about 10 amino acids, by about 15 amino acids, by about 20 amino acids, by about 25 amino acids, by about 30 amino acids, by about 40 amino acids, by about 50 amino acids, by about 75 amino acids, by about 100 amino acids, or more, provided that the dCas9 variants comprise mutations corresponding to D10A and comprises a histidine at a position corresponding to position 840 in SEQ ID NO: 1.

[0159] Additional suitable nuclease-inactive dCas9 domains will be apparent to those of skill in the art based on this disclosure and knowledge in the field, and are within the scope of this disclosure. Such additional exemplary suitable nuclease-inactive Cas9 domains include, but are not limited to, D10A/H840A, D10A/D839A/H840A, D10A/D839A/H840A/N863A mutant domains (See, e.g., Prashant et al., Nature Biotechnology. 2013; 31(9): 833-838, which are incorporated herein by reference), or K603R (See, e.g., Chavez et al., Nature Methods 12, 326-328, 2015, which is incorporated herein by reference.

[0160] In some embodiments, the nucleobase editors described herein comprise a Cas9 domain with decreased electrostatic interactions between the Cas9 domain and a sugar-phosphate backbone of a DNA, as compared to a wild-type Cas9 domain. In some embodiments, a Cas9 domain comprises one or more mutations that decreases the association between the Cas9 domain and a sugar-phosphate backbone of a DNA. In some embodiments, the nucleobase editors described herein comprises a dCas9 (e.g., with D10A and H840A mutations) or a Cas9 nickase (e.g., with D10A mutation), wherein the dCas9 or the Cas9 nickase further comprises one or more of a N497X, a R661X, a Q695X, and/or a Q926X mutation of the amino acid sequence provided in SEQ ID NO: 1, or a corresponding mutation in any of the amino acid sequences provided in SEQ ID NOs: 11-260, wherein X is any amino acid. In some embodiments, the nucleobase editors described herein comprises a dCas9 (e.g., with D10A and H840A mutations) or a Cas9 nickase (e.g., with D10A mutation), wherein the dCas9 or the Cas9 nickase further comprises one or more of a N497A, a R661A, a Q695A, and/or a Q926A mutation of the amino acid sequence provided in SEQ ID NO: 1, or a corresponding mutation in any of the amino acid sequences provided in SEQ ID NOs: 11-260. In some embodiments, the dCas9 domain (e.g., of any of the nucleobase editors provided herein) comprises the amino acid sequence as set forth in any one of SEQ ID NOs: 2-9. In some embodiments, the nucleobase editor comprises the amino acid sequence as set forth in any one of SEQ ID NOs: 293-302 and 321. In some embodiments, the Cas9 domain (e.g., of any of the fusion proteins provided herein) comprises the amino acid sequence as set forth in SEQ ID NO: 9. In some embodiments, the fusion protein comprises the amino acid sequence as set forth in SEQ ID NO: 321. Cas9 domains with high fidelity are known in the art and would be apparent to the skilled artisan. For example, Cas9 domains with high fidelity have been described in Kleinstiver, B. P., et al. “High-fidelity CRISPR-Cas9 nucleases with no detectable genome-wide off-target effects.” Nature 529, 490-495 (2016); and Slaymaker, I. M., et al. “Rationally engineered Cas9 nucleases with improved specificity.” Science 351, 84-88 (2015); the entire contents of each are incorporated herein by reference.

[0161] It should be appreciated that the base editors provided herein, for example, base editor 2 (BE2) or base editor 3 (BE3), may be converted into high fidelity base editors by modifying the Cas9 domain as described herein to generate high fidelity base editors, for example, high fidelity base editor 2 (HF-BE2) or high fidelity base editor 3 (HF-BE3). In some embodiments, base editor 2 (BE2) comprises a deaminase domain, a dCas9 domain, and a UGI domain. In some embodiments, base editor 3 (BE3) comprises a deaminase domain, a nCas9 domain, and a UGI domain.

Cas9 variant with decreased electrostatic
interactions between the Cas9 and DNA backbone.
DKKYSIGLAIGTNSVGWAVITDEYKVPSKKFKVLGNTDRHSIKKNLIGAL
LFDSGETAEATRLKRTARRRYTRRKNRICYLQEIFSNEMAKVDDSFFHRL
EESFLVEEDKKHERHPIFGNIVDEVAYHEKYPTIYHLRKKLVDSTDKADL
RLIYLALAHMIKFRGHFLIEGDLNPDNSDVDKLFIQLVQTYNQLFEENPI
NASGVDAKAILSARLSKSRRLENLIAQLPGEKKNGLFGNLIALSLGLTPN
FKSNFDLAEDAKLQLSKDTYDDDLDNLLAQIGDQYADLFLAAKNLSDAIL
LSDILRVNTEITKAPLSASMIKRYDEHHQDLTLLKALVRQQLPEKYKEIF
FDQSKNGYAGYIDGGASQEEFYKFIKPILEKMDGTEELLVKLNREDLLRK
QRTFDNGSIPHQIHLGELHAILRRQEDFYPFLKDNREKIEKILTFRIPYY
VGPLARGNSRFAWMTRKSEETITPWNFEEVVDKGASAQSFIERMTAFDKN
LPNEKVLPKHSLLYEYFTVYNELTKVKYVTEGMRKPAFLSGEQKKAIVDL
LFKTNRKVTVKQLKEDYFKKIECFDSVEISGVEDRFNASLGTYHDLLKII
KDKDFLDNEENEDILEDIVLTLTLFEDREMIEERLKTYAHLFDDKVMKQL
KRRRYTGWGALSRKLINGIRDKQSGKTILDFLKSDGFANRNFMALIHDDS
LTFKEDIQKAQVSGQGDSLHEHIANLAGSPAIKKGILQTVKVVDELVKVM
GRHKPENIVIEMARENQTTQKGQKNSRERMKRIEEGIKELGSQILKEHPV
ENTQLQNEKLYLYYLQNGRDMYVDQELDINRLSDYDVDHIVPQSFLKDDS
IDNKVLTRSDKNRGKSDNVPSEEVVKKMKNYWRQLLNAKLITQRKFDNLT
KAERGGLSELDKAGFIKRQLVETRAITKHVAQILDSRMNTKYDENDKLIR
EVKVITLKSKLVSDFRKDFQFYKVREINNYHHAHDAYLNAVVGTALIKKY
PKLESEFVYGDYKVYDVRKMIAKSEQEIGKATAKYFFYSNIMNFFKTEIT
LANGEIRKRPLIETNGETGEIVWDKGRDFATVRKVLSMPQVNIVKKTEVQ
TGGFSKESILPKRNSDKLIARKKDWDPKKYGGFDSPTVAYSVLVVAKVEK
GKSKKLKSVKELLGITIMERSSFEKNPIDFLEAKGYKEVKKDLIIKLPKY
SLFELENGRKRMLASAGELQKGNELALPSKYVNFLYLASHYEKLKGSPED
NEQKQLFVEQHKHYLDEIIEQISEFSKRVILADANLDKVLSAYNKHRDKP
IREQAENIIHLFTLTNLGAPAAFKYFDTTIDRKRYTSTKEVLDATLIHQS
ITGLYETRIDLSQLGGD (SEQ ID NO: 9, mutations
relative to SEQ ID NO: 1 are bolded
and underlined)
High fidelity nucleobase editor (HF-BE3)

(SEQ ID NO: 321)

MSSETGPVAVDPTLRRRIEPHEFEVFFDPRELRKETCLLYEINWGGRHSI
WRHTSQNTNKHVEVNFIEKFTTERYFCPNTRCSITWFLSWSPCGECSRAI
TEFLSRYPHVTLFIYIARLYHHADPRNRQGLRDLISSGVTIQIMTEQESG
YCWRNFVNYSPSNEAHWPRYPHLWVRLYVLELYCIILGLPPCLNILRRKQ
PQLTFFTIALQSCHYQRLPPHILWATGLKSGSETPGTSESATPESDKKYS
IGLAIGTNSVGWAVITDEYKVPSKKFKVLGNTDRHSIKKNLIGALLFDSG
ETAEATRLKRTARRRYTRRKNRICYLQEIFSNEMAKVDDSFFHRLEESFL
VEEDKKHERHPIFGNIVDEVAYHEKYPTIYHLRKKLVDSTDKADLRLIYL
ALAHMIKFRGHFLIEGDLNPDNSDVDKLFIQLVQTYNQLFEENPINASGV
DAKAILSARLSKSRRLENLIAQLPGEKKNGLFGNLIALSLGLTPNFKSNF
DLAEDAKLQLSKDTYDDDLDNLLAQIGDQYADLFLAAKNLSDAILLSDIL
RVNTEITKAPLSASMIKRYDEHHQDLTLLKALVRQQLPEKYKEIFFDQSK
NGYAGYIDGGASQEEFYKFIKPILEKMDGTEELLVKLNREDLLRKQRTFD
NGSIPHQIHLGELHAILRRQEDFYPFLKDNREKIEKILTFRIPYYVGPLA
RGNSRFAWMTRKSEETITPWNFEEVVDKGASAQSFIERMTAFDKNLPNEK
VLPKHSLLYEYFTVYNELTKVKYVTEGMRKPAFLSGEQKKAIVDLLFKTN
RKVTVKQLKEDYFKKIECFDSVETSGVEDRFNASLGTYHDLLKIIKDKDF
LDNEENEDILEDIVLTLTLFEDREMIEERLKTYAHLFDDKVMKQLKRRRY
TGWGALSRKLINGIRDKQSGKTILDFLKSDGFANRNFMALIHDDSLTFKE
DIQKAQVSGQGDSLHEHIANLAGSPAIKKGILQTVKVVDELVKVMGRHKP
ENIVIEMARENQTTQKGQKNSRERMKRIEEGIKELGSQILKEHPVENTQL
QNEKLYLYYLQNGRDMYVDQELDINRLSDYDVDHIVPQSFLKDDSIDNKV
LTRSDKNRGKSDNVPSEEVVKKMKNYWRQLLNAKLITQRKFDNLTKAERG
GLSELDKAGFIKRQLVETRAITKHVAQILDSRMNTKYDENDKLIREVKVI
TLKSKLVSDFRKDFQFYKVREINNYHHAHDAYLNAVVGTALIKKYPKLES
EFVYGDYKVYDVRKMIAKSEQEIGKATAKYFFYSNIMNFFKTEITLANGE
IRKRPLIETNGETGEIVWDKGRDFATVRKVLSMPQVNIVKKTEVQTGGFS
KESILPKRNSDKLIARKKDWDPKKYGGFDSPTVAYSVLVVAKVEKGKSKK
LKSVKELLGITIMERSSFEKNPIDFLEAKGYKEVKKDLIIKLPKYSLFEL
ENGRKRMLASAGELQKGNELALPSKYVNFLYLASHYEKLKGSPEDNEQKQ
LFVEQHKHYLDEIIEQISEFSKRVILADANLDKVLSAYNKHRDKPIREQA
ENIIHLFTLTNLGAPAAFKYFDTTIDRKRYTSTKEVLDATLIHQSITGLY
ETRIDLSQLGGD

[0162] Cas9 recognizes a short motif (PAM motif) in the CRISPR repeat sequences in the target DNA sequence. A “PAM motif,” or “protospacer adjacent motif,” as used herein, refers a DNA sequence immediately following the DNA sequence targeted by the Cas9 nuclease in the CRISPR bacterial adaptive immune system. PAM is a component of the invading virus or plasmid, but is not a component of the bacterial CRISPR locus. Naturally, Cas9 will not successfully bind to or cleave the target DNA sequence if it is not followed by the PAM sequence. PAM is an essential targeting component (not found in the bacterial genome) which distinguishes bacterial self from non-self DNA, thereby preventing the CRISPR locus from being targeted and destroyed by nuclease.

[0163] Wild-type Streptococcus pyogenes Cas9 recognizes a canonical PAM sequence (5′-NGG-3′). Other Cas9 nucleases (e.g., Cas9 from Streptococcus thermophiles, Staphylococcus aureus, Neisseria meningitidis, or Treponema denticolaor) and Cas9 variants thereof have been described in the art to have different, or more relaxed PAM requirements. For example, in Kleinstiver et al., Nature 523, 481-485, 2015; Klenstiver et al., Nature 529, 490-495, 2016; Ran et al., Nature, April 9; 520(7546): 186-191, 2015; Kleinstiver et al., Nat Biotechnol, 33(12):1293-1298, 2015; Hou et al., Proc Natl Acad Sci USA, 110(39):15644-9, 2014; Prykhozhij et al., PLoS One, 10(3): e0119372, 2015; Zetsche et al., Cell 163, 759-771, 2015; Gao et al., Nature Biotechnology, doi:10.1038/nbt.3547, 2016; Want et al., Nature 461, 754-761, 2009; Chavez et al., doi: dx.doi.org/10.1101/058974; Fagerlund et al., Genome Biol. 2015; 16: 25, 2015; Zetsche et al., Cell, 163, 759-771, 2015; and Swarts et al., Nat Struct Mol Biol, 21(9):743-53, 2014, each of which is incorporated herein by reference.

[0164] Thus, the guide nucleotide sequence-programmable DNA-binding protein of the present disclosure may recognize a variety of PAM sequences including, without limitation: NGG, NGAN, NGNG, NGAG, NGCG, NNGRRT, NGRRN, NNNRRT, NNNGATT, NNAGAAW, NAAAC, TTN, TTTN, and YTN, wherein Y is a pyrimidine, and N is any nucleobase.

[0165] One example of an RNA-programmable DNA-binding protein that has different PAM specificity is Clustered Regularly Interspaced Short Palindromic Repeats from Prevotella and Francisella 1 (Cpf1). Similar to Cas9, Cpf1 is also a class 2 CRISPR effector. It has been shown that Cpf1 mediates robust DNA interference with features distinct from Cas9. Cpf1 is a single RNA-guided endonuclease lacking tracrRNA, and it utilizes a T-rich protospacer-adjacent motif (TTN, TTTN, or YTN). Moreover, Cpf1 cleaves DNA via a staggered DNA double-stranded break. Out of 16 Cpf1-family proteins, two enzymes from Acidaminococcus and Lachnospiraceae are shown to have efficient genome-editing activity in human cells.

[0166] Also useful in the present disclosure are nuclease-inactive Cpf1 (dCpf1) variants that may be used as a guide nucleotide sequence-programmable DNA-binding protein domain. The Cpf1 protein has a RuvC-like endonuclease domain that is similar to the RuvC domain of Cas9 but does not have a HNH endonuclease domain, and the N-terminal of Cpf1 does not have the alfa-helical recognition lobe of Cas9. It was shown in Zetsche et al., Cell, 163, 759-771, 2015 (which is incorporated herein by reference) that, the RuvC-like domain of Cpf1 is responsible for cleaving both DNA strands and inactivation of the RuvC-like domain inactivates Cpf1 nuclease activity. For example, mutations corresponding to D917A, E1006A, or D1255A in Francisella novicida Cpf1 (SEQ ID NO: 10) inactivates Cpf1 nuclease activity. In some embodiments, the dCpf1 of the present disclosure comprises mutations corresponding to D917A, E1006A, D1255A, D917A/E1006A, D917A/D1255A, E1006A/D1255A, or D917A/E1006A/D1255A in SEQ ID NO: 10. It is to be understood that any mutations, e.g., substitution mutations, deletions, or insertions that inactivates the RuvC domain of Cpf1 may be used in accordance with the present disclosure.

[0167] Thus, in some embodiments, the guide nucleotide sequence-programmable DNA binding protein is a nuclease inactive Cpf1 (dCpf1). In some embodiments, the dCpf1 comprises the amino acid sequence of any one SEQ ID NOs: 261-267 or 2007-2014. In some embodiments, the dCpf1 comprises an amino acid sequence that is at least 85%, at least 90%, at least 91%, at least 92%, at least 93%, at least 94%, at least 95%, at least 96%, at least 97%, at least 98%, at least 99%, or at ease 99.5% identical to SEQ ID NO: 10, and comprises mutations corresponding to D917A, E1006A, D1255A, D917A/E1006A, D917A/D1255A, E1006A/D1255A, or D917A/E1006A/D1255A in SEQ ID NO: 10. Cpf1 from other bacterial species may also be used in accordance with the present disclosure.

Wild type Francisella novicida Cpf1 (SEQ ID NO:
10) (D917, E1006, and D1255 are bolded and
underlined)
MSIYQEFVNKYSLSKTLRFELIPQGKTLENIKARGLILDDEKRAKDYKKA
KQIIDKYHQFFIEEILSSVCISEDLLQNYSDVYFKLKKSDDDNLQKDFKS
AKDTIKKQISEYIKDSEKFKNLFNQNLIDAKKGQESDLILWLKQSKDNGI
ELFKANSDITDIDEALEIIKSFKGWTTYFKGFHENRKNVYSSNDIPTSII
YRIVDDNLPKFLENKAKYESLKDKAPEAINYEQIKKDLAEELTFDIDYKT
SEVNQRVFSLDEVFEIANFNNYLNQSGITKFNTIIGGKFVNGENTKRKGI
NEYINLYSQQINDKTLKKYKMSVLFKQILSDTESKSFVIDKLEDDSDVVT
TMQSFYEQIAAFKTVEEKSIKETLSLLFDDLKAQKLDLSKIYFKNDKSLT
DLSQQVFDDYSVIGTAVLEYITQQIAPKNLDNPSKKEQELIAKKTEKAKY
LSLETIKLALEEFNKHRDIDKQCRFEEILANFAAIPMIFDEIAQNKDNLA
QISIKYQNQGKKDLLQASAEDDVKAIKDLLDQTNNLLHKLKIFHISQSED
KANILDKDEHFYLVFEECYFELANIVPLYNKIRNYITQKPYSDEKFKLNF
ENSTLANGWDKNKEPDNTAILFIKDDKYYLGVMNKKNNKIFDDKAIKENK
GEGYKKIVYKLLPGANKMLPKVFFSAKSIKFYNPSEDILRIRNHSTHTKN
GSPQKGYEKFEFNIEDCRKFIDFYKQSISKHPEWKDFGFRFSDTQRYNSI
DEFYREVENQGYKLTFENISESYIDSVVNQGKLYLFQIYNKDFSAYSKGR
PNLHTLYWKALFDERNLQDVVYKLNGEAELFYRKQSIPKKITHPAKEAIA
NKNKDNPKKESVFEYDLIKDKRFTEDKFFFHCPITINFKSSGANKFNDEI
NLLLKEKANDVHILSIDRGERHLAYYTLVDGKGNIIKQDTFNIIGNDRMK
TNYHDKLAAIEKDRDSARKDWKKINNIKEMKEGYLSQVVHEIAKLVIEYN
AIVVFEDLNFGFKRGRFKVEKQVYQKLEKMLIEKLNYLVFKDNEFDKTGG
VLRAYQLTAPFETFKKMGKQTGIIYYVPAGFTSKICPVTGFVNQLYPKYE
SVSKSQEFFSKFDKICYNLDKGYFEFSFDYKNFGDKAAKGKWTIASFGSR
LINFRNSDKNHNWDTREVYPTKELEKLLKDYSIEYGHGECIKAAICGESD
KKFFAKLTSVLNTILQMRNSKTGTELDYLISPVADVNGNFFDSRQAPKNM
PQDADANGAYHIGLKGLMLLGRIKNNQEGKKLNLVIKNEEYFEFVQNRNN
Francisella novicida Cpf1 D917A (SEQ ID NO: 261)
(A917, E1006, and D1255 are bolded and underlined)
MSIYQEFVNKYSLSKTLRFELIPQGKTLENIKARGLILDDEKRAKDYKKA
KQIIDKYHQFFIEEILSSVCISEDLLQNYSDVYFKLKKSDDDNLQKDFKS
AKDTIKKQISEYIKDSEKFKNLFNQNLIDAKKGQESDLILWLKQSKDNGI
ELFKANSDITDIDEALEIIKSFKGWTTYFKGFHENRKNVYSSNDIPTSII
YRIVDDNLPKFLENKAKYESLKDKAPEAINYEQIKKDLAEELTFDIDYKT
SEVNQRVFSLDEVFEIANFNNYLNQSGITKFNTIIGGKFVNGENTKRKGI
NEYINLYSQQINDKTLKKYKMSVLFKQILSDTESKSFVIDKLEDDSDVVT
TMQSFYEQIAAFKTVEEKSIKETLSLLFDDLKAQKLDLSKIYFKNDKSLT
DLSQQVFDDYSVIGTAVLEYITQQIAPKNLDNPSKKEQELIAKKTEKAKY
LSLETIKLALEEFNKHRDIDKQCRFEEILANFAAIPMIFDEIAQNKDNLA
QISIKYQNQGKKDLLQASAEDDVKAIKDLLDQTNNLLHKLKIFHISQSED
KANILDKDEHFYLVFEECYFELANIVPLYNKIRNYITQKPYSDEKFKLNF
ENSTLANGWDKNKEPDNTAILFIKDDKYYLGVMNKKNNKIFDDKAIKENK
GEGYKKIVYKLLPGANKMLPKVFFSAKSIKFYNPSEDILRIRNHSTHTKN
GSPQKGYEKFEFNIEDCRKFIDFYKQSISKHPEWKDFGFRFSDTQRYNSI
DEFYREVENQGYKLTFENISESYIDSVVNQGKLYLFQIYNKDFSAYSKGR
PNLHTLYWKALFDERNLQDVVYKLNGEAELFYRKQSIPKKITHPAKEAIA
NKNKDNPKKESVFEYDLIKDKRFTEDKFFFHCPITINFKSSGANKFNDEI
NLLLKEKANDVHILSIARGERHLAYYTLVDGKGNIIKQDTFNIIGNDRMK
TNYHDKLAAIEKDRDSARKDWKKINNIKEMKEGYLSQVVHEIAKLVIEYN
AIVVFEDLNFGFKRGRFKVEKQVYQKLEKMLIEKLNYLVFKDNEFDKTGG
VLRAYQLTAPFETFKKMGKQTGIIYYVPAGFTSKICPVTGFVNQLYPKYE
SVSKSQEFFSKFDKICYNLDKGYFEFSFDYKNFGDKAAKGKWTIASFGSR
LINFRNSDKNHNWDTREVYPTKELEKLLKDYSIEYGHGECIKAAICGESD
KKFFAKLTSVLNTILQMRNSKTGTELDYLISPVADVNGNFFDSRQAPKNM
PQDADANGAYHIGLKGLMLLGRIKNNQEGKKLNLVIKNEEYFEFVQNRNN
Francisella novicida Cpf1 E1006A (SEQ ID NO: 262)
(D917, A1006, and D1255 are bolded and underlined)
MSIYQEFVNKYSLSKTLRFELIPQGKTLENIKARGLILDDEKRAKDYKKA
KQIIDKYHQFFIEEILSSVCISEDLLQNYSDVYFKLKKSDDDNLQKDFKS
AKDTIKKQISEYIKDSEKFKNLFNQNLIDAKKGQESDLILWLKQSKDNGI
ELFKANSDITDIDEALEIIKSFKGWTTYFKGFHENRKNVYSSNDIPTSII
YRIVDDNLPKFLENKAKYESLKDKAPEAINYEQIKKDLAEELTFDIDYKT
SEVNQRVFSLDEVFEIANFNNYLNQSGITKFNTIIGGKFVNGENTKRKGI
NEYINLYSQQINDKTLKKYKMSVLFKQILSDTESKSFVIDKLEDDSDVVT
TMQSFYEQIAAFKTVEEKSIKETLSLLFDDLKAQKLDLSKIYFKNDKSLT
DLSQQVFDDYSVIGTAVLEYITQQIAPKNLDNPSKKEQELIAKKTEKAKY
LSLETIKLALEEFNKHRDIDKQCRFEEILANFAAIPMIFDEIAQNKDNLA
QISIKYQNQGKKDLLQASAEDDVKAIKDLLDQTNNLLHKLKIFHISQSED
KANILDKDEHFYLVFEECYFELANIVPLYNKIRNYITQKPYSDEKFKLNF
ENSTLANGWDKNKEPDNTAILFIKDDKYYLGVMNKKNNKIFDDKAIKENK
GEGYKKIVYKLLPGANKMLPKVFFSAKSIKFYNPSEDILRIRNHSTHTKN
GSPQKGYEKFEFNIEDCRKFIDFYKQSISKHPEWKDFGFRFSDTQRYNSI
DEFYREVENQGYKLTFENISESYIDSVVNQGKLYLFQIYNKDFSAYSKGR
PNLHTLYWKALFDERNLQDVVYKLNGEAELFYRKQSIPKKITHPAKEAIA
NKNKDNPKKESVFEYDLIKDKRFTEDKFFFHCPITINFKSSGANKFNDEI
NLLLKEKANDVHILSIDRGERHLAYYTLVDGKGNIIKQDTFNIIGNDRMK
TNYHDKLAAIEKDRDSARKDWKKINNIKEMKEGYLSQVVHEIAKLVIEYN
AIVVFADLNFGFKRGRFKVEKQVYQKLEKMLIEKLNYLVFKDNEFDKTGG
VLRAYQLTAPFETFKKMGKQTGIIYYVPAGFTSKICPVTGFVNQLYPKYE
SVSKSQEFFSKFDKICYNLDKGYFEFSFDYKNFGDKAAKGKWTIASFGSR
LINFRNSDKNHNWDTREVYPTKELEKLLKDYSIEYGHGECIKAAICGESD
KKFFAKLTSVLNTILQMRNSKTGTELDYLISPVADVNGNFFDSRQAPKNM
PQDADANGAYHIGLKGLMLLGRIKNNQEGKKLNLVIKNEEYFEFVQNRNN
Francisella novicida Cpf1 D1255A (SEQ ID NO: 263)
(D917, E1006, and A1255 are bolded and underlined)
MSIYQEFVNKYSLSKTLRFELIPQGKTLENIKARGLILDDEKRAKDYKKA
KQIIDKYHQFFIEEILSSVCISEDLLQNYSDVYFKLKKSDDDNLQKDFKS
AKDTIKKQISEYIKDSEKFKNLFNQNLIDAKKGQESDLILWLKQSKDNGI
ELFKANSDITDIDEALEIIKSFKGWTTYFKGFHENRKNVYSSNDIPTSII
YRIVDDNLPKFLENKAKYESLKDKAPEAINYEQIKKDLAEELTFDIDYKT
SEVNQRVFSLDEVFEIANFNNYLNQSGITKFNTIIGGKFVNGENTKRKGI
NEYINLYSQQINDKTLKKYKMSVLFKQILSDTESKSFVIDKLEDDSDVVT
TMQSFYEQIAAFKTVEEKSIKETLSLLFDDLKAQKLDLSKIYFKNDKSLT
DLSQQVFDDYSVIGTAVLEYITQQIAPKNLDNPSKKEQELIAKKTEKAKY
LSLETIKLALEEFNKHRDIDKQCRFEEILANFAAIPMIFDEIAQNKDNLA
QISIKYQNQGKKDLLQASAEDDVKAIKDLLDQTNNLLHKLKIFHISQSED
KANILDKDEHFYLVFEECYFELANIVPLYNKIRNYITQKPYSDEKFKLNF
ENSTLANGWDKNKEPDNTAILFIKDDKYYLGVMNKKNNKIFDDKAIKENK
GEGYKKIVYKLLPGANKMLPKVFFSAKSIKFYNPSEDILRIRNHSTHTKN
GSPQKGYEKFEFNIEDCRKFIDFYKQSISKHPEWKDFGFRFSDTQRYNSI
DEFYREVENQGYKLTFENISESYIDSVVNQGKLYLFQIYNKDFSAYSKGR
PNLHTLYWKALFDERNLQDVVYKLNGEAELFYRKQSIPKKITHPAKEAIA
NKNKDNPKKESVFEYDLIKDKRFTEDKFFFHCPITINFKSSGANKFNDEI
NLLLKEKANDVHILSIDRGERHLAYYTLVDGKGNIIKQDTFNIIGNDRMK
TNYHDKLAAIEKDRDSARKDWKKINNIKEMKEGYLSQVVHEIAKLVIEYN
AIVVFEDLNFGFKRGRFKVEKQVYQKLEKMLIEKLNYLVFKDNEFDKTGG
VLRAYQLTAPFETFKKMGKQTGIIYYVPAGFTSKICPVTGFVNQLYPKYE
SVSKSQEFFSKFDKICYNLDKGYFEFSFDYKNFGDKAAKGKWTIASFGSR
LINFRNSDKNHNWDTREVYPTKELEKLLKDYSIEYGHGECIKAAICGESD
KKFFAKLTSVLNTILQMRNSKTGTELDYLISPVADVNGNFFDSRQAPKNM
PQDAAANGAYHIGLKGLMLLGRIKNNQEGKKLNLVIKNEEYFEFVQNRNN
Francisella novicida Cpf1 D917A/E1006A (SEQ ID
NO: 264) (A917, A1006, and D1255 are bolded
and underlined)
MSIYQEFVNKYSLSKTLRFELIPQGKTLENIKARGLILDDEKRAKDYKKA
KQIIDKYHQFFIEEILSSVCISEDLLQNYSDVYFKLKKSDDDNLQKDFKS
AKDTIKKQISEYIKDSEKFKNLFNQNLIDAKKGQESDLILWLKQSKDNGI
ELFKANSDITDIDEALEIIKSFKGWTTYFKGFHENRKNVYSSNDIPTSII
YRIVDDNLPKFLENKAKYESLKDKAPEAINYEQIKKDLAEELTFDIDYKT
SEVNQRVFSLDEVFEIANFNNYLNQSGITKFNTIIGGKFVNGENTKRKGI
NEYINLYSQQINDKTLKKYKMSVLFKQILSDTESKSFVIDKLEDDSDVVT
TMQSFYEQIAAFKTVEEKSIKETLSLLFDDLKAQKLDLSKIYFKNDKSLT
DLSQQVFDDYSVIGTAVLEYITQQIAPKNLDNPSKKEQELIAKKTEKAKY
LSLETIKLALEEFNKHRDIDKQCRFEEILANFAAIPMIFDEIAQNKDNLA
QISIKYQNQGKKDLLQASAEDDVKAIKDLLDQTNNLLHKLKIFHISQSED
KANILDKDEHFYLVFEECYFELANIVPLYNKIRNYITQKPYSDEKFKLNF
ENSTLANGWDKNKEPDNTAILFIKDDKYYLGVMNKKNNKIFDDKAIKENK
GEGYKKIVYKLLPGANKMLPKVFFSAKSIKFYNPSEDILRIRNHSTHTKN
GSPQKGYEKFEFNIEDCRKFIDFYKQSISKHPEWKDFGFRFSDTQRYNSI
DEFYREVENQGYKLTFENISESYIDSVVNQGKLYLFQIYNKDFSAYSKGR
PNLHTLYWKALFDERNLQDVVYKLNGEAELFYRKQSIPKKITHPAKEAIA
NKNKDNPKKESVFEYDLIKDKRFTEDKFFFHCPITINFKSSGANKFNDEI
NLLLKEKANDVHILSIARGERHLAYYTLVDGKGNIIKQDTFNIIGNDRMK
TNYHDKLAAIEKDRDSARKDWKKINNIKEMKEGYLSQVVHEIAKLVIEYN
AIVVFADLNFGFKRGRFKVEKQVYQKLEKMLIEKLNYLVFKDNEFDKTGG
VLRAYQLTAPFETFKKMGKQTGIIYYVPAGFTSKICPVTGFVNQLYPKYE
SVSKSQEFFSKFDKICYNLDKGYFEFSFDYKNFGDKAAKGKWTIASFGSR
LINFRNSDKNHNWDTREVYPTKELEKLLKDYSIEYGHGECIKAAICGESD
KKFFAKLTSVLNTILQMRNSKTGTELDYLISPVADVNGNFFDSRQAPKNM
PQDADANGAYHIGLKGLMLLGRIKNNQEGKKLNLVIKNEEYFEFVQNRNN
Francisella novicida Cpf1 D917A/D1255A (SEQ ID
NO: 265) (A917, E1006, and A1255 are bolded
and underlined)
MSIYQEFVNKYSLSKTLRFELIPQGKTLENIKARGLILDDEKRAKDYKKA
KQIIDKYHQFFIEEILSSVCISEDLLQNYSDVYFKLKKSDDDNLQKDFKS
AKDTIKKQISEYIKDSEKFKNLFNQNLIDAKKGQESDLILWLKQSKDNGI
ELFKANSDITDIDEALEIIKSFKGWTTYFKGFHENRKNVYSSNDIPTSII
YRIVDDNLPKFLENKAKYESLKDKAPEAINYEQIKKDLAEELTFDIDYKT
SEVNQRVFSLDEVFEIANFNNYLNQSGITKFNTIIGGKFVNGENTKRKGI
NEYINLYSQQINDKTLKKYKMSVLFKQILSDTESKSFVIDKLEDDSDVVT
TMQSFYEQIAAFKTVEEKSIKETLSLLFDDLKAQKLDLSKIYFKNDKSLT
DLSQQVFDDYSVIGTAVLEYITQQIAPKNLDNPSKKEQELIAKKTEKAKY
LSLETIKLALEEFNKHRDIDKQCRFEEILANFAAIPMIFDEIAQNKDNLA
QISIKYQNQGKKDLLQASAEDDVKAIKDLLDQTNNLLHKLKIFHISQSED
KANILDKDEHFYLVFEECYFELANIVPLYNKIRNYITQKPYSDEKFKLNF
ENSTLANGWDKNKEPDNTAILFIKDDKYYLGVMNKKNNKIFDDKAIKENK
GEGYKKIVYKLLPGANKMLPKVFFSAKSIKFYNPSEDILRIRNHSTHTKN
GSPQKGYEKFEFNIEDCRKFIDFYKQSISKHPEWKDFGFRFSDTQRYNSI
DEFYREVENQGYKLTFENISESYIDSVVNQGKLYLFQIYNKDFSAYSKGR
PNLHTLYWKALFDERNLQDVVYKLNGEAELFYRKQSIPKKITHPAKEAIA
NKNKDNPKKESVFEYDLIKDKRFTEDKFFFHCPITINFKSSGANKFNDEI
NLLLKEKANDVHILSIARGERHLAYYTLVDGKGNIIKQDTFNIIGNDRMK
TNYHDKLAAIEKDRDSARKDWKKINNIKEMKEGYLSQVVHEIAKLVIEYN
AIVVFEDLNFGFKRGRFKVEKQVYQKLEKMLIEKLNYLVFKDNEFDKTGG
VLRAYQLTAPFETFKKMGKQTGIIYYVPAGFTSKICPVTGFVNQLYPKYE
SVSKSQEFFSKFDKICYNLDKGYFEFSFDYKNFGDKAAKGKWTIASFGSR
LINFRNSDKNHNWDTREVYPTKELEKLLKDYSIEYGHGECIKAAICGESD
KKFFAKLTSVLNTILQMRNSKTGTELDYLISPVADVNGNFFDSRQAPKNM
PQDAAANGAYHIGLKGLMLLGRIKNNQEGKKLNLVIKNEEYFEFVQNRNN
Francisella novicida Cpf1 E1006A/D1255A (SEQ
ID NO: 266) (D917, A1006, and A1255 are bolded
and underlined)
MSIYQEFVNKYSLSKTLRFELIPQGKTLENIKARGLILDDEKRAKDYKKA
KQIIDKYHQFFIEEILSSVCISEDLLQNYSDVYFKLKKSDDDNLQKDFKS
AKDTIKKQISEYIKDSEKFKNLFNQNLIDAKKGQESDLILWLKQSKDNGI
ELFKANSDITDIDEALEIIKSFKGWTTYFKGFHENRKNVYSSNDIPTSII
YRIVDDNLPKFLENKAKYESLKDKAPEAINYEQIKKDLAEELTFDIDYKT
SEVNQRVFSLDEVFEIANFNNYLNQSGITKFNTIIGGKFVNGENTKRKGI
NEYINLYSQQINDKTLKKYKMSVLFKQILSDTESKSFVIDKLEDDSDVVT
TMQSFYEQIAAFKTVEEKSIKETLSLLFDDLKAQKLDLSKIYFKNDKSLT
DLSQQVFDDYSVIGTAVLEYITQQIAPKNLDNPSKKEQELIAKKTEKAKY
LSLETIKLALEEFNKHRDIDKQCRFEEILANFAAIPMIFDEIAQNKDNLA
QISIKYQNQGKKDLLQASAEDDVKAIKDLLDQTNNLLHKLKIFHISQSED
KANILDKDEHFYLVFEECYFELANIVPLYNKIRNYITQKPYSDEKFKLNF
ENSTLANGWDKNKEPDNTAILFIKDDKYYLGVMNKKNNKIFDDKAIKENK
GEGYKKIVYKLLPGANKMLPKVFFSAKSIKFYNPSEDILRIRNHSTHTKN
GSPQKGYEKFEFNIEDCRKFIDFYKQSISKHPEWKDFGFRFSDTQRYNSI
DEFYREVENQGYKLTFENISESYIDSVVNQGKLYLFQIYNKDFSAYSKGR
PNLHTLYWKALFDERNLQDVVYKLNGEAELFYRKQSIPKKITHPAKEAIA
NKNKDNPKKESVFEYDLIKDKRFTEDKFFFHCPITINFKSSGANKFNDEI
NLLLKEKANDVHILSIDRGERHLAYYTLVDGKGNIIKQDTFNIIGNDRMK
TNYHDKLAAIEKDRDSARKDWKKINNIKEMKEGYLSQVVHEIAKLVIEYN
AIVVFADLNFGFKRGRFKVEKQVYQKLEKMLIEKLNYLVFKDNEFDKTGG
VLRAYQLTAPFETFKKMGKQTGIIYYVPAGFTSKICPVTGFVNQLYPKYE
SVSKSQEFFSKFDKICYNLDKGYFEFSFDYKNFGDKAAKGKWTIASFGSR
LINFRNSDKNHNWDTREVYPTKELEKLLKDYSIEYGHGECIKAAICGESD
KKFFAKLTSVLNTILQMRNSKTGTELDYLISPVADVNGNFFDSRQAPKNM
PQDAAANGAYHIGLKGLMLLGRIKNNQEGKKLNLVIKNEEYFEFVQNRNN
Francisella novicida Cpf1 D917A/E1006A/D1255A (SEQ
ID NO: 267) (A917, A1006, and A1255 are bolded
and underlined)
MSIYQEFVNKYSLSKTLRFELIPQGKTLENIKARGLILDDEKRAKDYKKA
KQIIDKYHQFFIEEILSSVCISEDLLQNYSDVYFKLKKSDDDNLQKDFKS
AKDTIKKQISEYIKDSEKFKNLFNQNLIDAKKGQESDLILWLKQSKDNGI
ELFKANSDITDIDEALEIIKSFKGWTTYFKGFHENRKNVYSSNDIPTSII
YRIVDDNLPKFLENKAKYESLKDKAPEAINYEQIKKDLAEELTFDIDYKT
SEVNQRVFSLDEVFEIANFNNYLNQSGITKFNTIIGGKFVNGENTKRKGI
NEYINLYSQQINDKTLKKYKMSVLFKQILSDTESKSFVIDKLEDDSDVVT
TMQSFYEQIAAFKTVEEKSIKETLSLLFDDLKAQKLDLSKIYFKNDKSLT
DLSQQVFDDYSVIGTAVLEYITQQIAPKNLDNPSKKEQELIAKKTEKAKY
LSLETIKLALEEFNKHRDIDKQCRFEEILANFAAIPMIFDEIAQNKDNLA
QISIKYQNQGKKDLLQASAEDDVKAIKDLLDQTNNLLHKLKIFHISQSED
KANILDKDEHFYLVFEECYFELANIVPLYNKIRNYITQKPYSDEKFKLNF
ENSTLANGWDKNKEPDNTAILFIKDDKYYLGVMNKKNNKIFDDKAIKENK
GEGYKKIVYKLLPGANKMLPKVFFSAKSIKFYNPSEDILRIRNHSTHTKN
GSPQKGYEKFEFNIEDCRKFIDFYKQSISKHPEWKDFGFRFSDTQRYNSI
DEFYREVENQGYKLTFENISESYIDSVVNQGKLYLFQIYNKDFSAYSKGR
PNLHTLYWKALFDERNLQDVVYKLNGEAELFYRKQSIPKKITHPAKEAIA
NKNKDNPKKESVFEYDLIKDKRFTEDKFFFHCPITINFKSSGANKFNDEI
NLLLKEKANDVHILSIARGERHLAYYTLVDGKGNIIKQDTFNIIGNDRMK
TNYHDKLAAIEKDRDSARKDWKKINNIKEMKEGYLSQVVHEIAKLVIEYN
AIVVFADLNFGFKRGRFKVEKQVYQKLEKMLIEKLNYLVFKDNEFDKTGG
VLRAYQLTAPFETFKKMGKQTGIIYYVPAGFTSKICPVTGFVNQLYPKYE
SVSKSQEFFSKFDKICYNLDKGYFEFSFDYKNFGDKAAKGKWTIASFGSR
LINFRNSDKNHNWDTREVYPTKELEKLLKDYSIEYGHGECIKAAICGESD
KKFFAKLTSVLNTILQMRNSKTGTELDYLISPVADVNGNFFDSRQAPKNM
PQDAAANGAYHIGLKGLMLLGRIKNNQEGKKLNLVIKNEEYFEFVQNRNN

[0168] In some embodiments, the guide nucleotide sequence-programmable DNA binding protein is a Cpf1 protein from an Acidaminoccous species (AsCpf1). Cpf1 proteins form Acidaminococcus species have been described previously and would be apparent to the skilled artisan. Exemplary Acidaminococcus Cpf1 proteins (AsCpf1) include, without limitation, any of the AsCpf1 proteins provided herein.

Wild-type AsCpf1-Residue R912 is indicated in bold
underlining and residues 661-667 are indicated
in italics and underlining.

(SEQ ID NO: 2007)

TQFEGFTNLYQVSKTLRFELIPQGKTLKHIQEQGFIEEDKARNDHYKELK
PIIDRIYKTYADQCLQLVQLDWENLSAAIDSYRKEKTEETRNALIEEQAT
YRNAIHDYFIGRTDNLTDAINKRHAEIYKGLFKAELFNGKVLKQLGTVTT
TEHENALLRSFDKFTTYFSGFYENRKNVFSAEDISTAIPHRIVQDNFPKF
KENCHIFTRLITAVPSLREHFENVKKAIGIFVSTSIEEVFSFPFYNQLLT
QTQIDLYNQLLGGISREAGTEKIKGLNEVLNLAIQKNDETAHIIASLPHR
FIPLFKQILSDRNTLSFILEEFKSDEEVIQSFCKYKTLLRNENVLETAEA
LFNELNSIDLTHIFISHKKLETISSALCDHWDTLRNALYERRISELTGKI
TKSAKEKVQRSLKHEDINLQEIISAAGKELSEAFKQKTSEILSHAHAALD
QPLPTTMLKKQEEKEILKSQLDSLLGLYHLLDWFAVDESNEVDPEFSARL
TGIKLEMEPSLSFYNKARNYATKKPYSVEKFKLNFQMPTLASGWDVNKEK
NNGAILFVKNGLYYLGIMPKQKGRYKALSFEPTEKTSEGFDKMYYDYFPD
AAKMIPKCSTQLKAVTAHFQTHTTPILLSNNFIEPLEITKEIYDLNNPEK
EPKKFQTAYAKKTGDQKGYREALCKWIDFTRDFLSKYTKTTSIDLSSLRP
SSQYKDLGEYYAELNPLLYHISFQRIAEKEIMDAVETGKLYLFQIYNKDF
AKGHHGKPNLHTLYWTGLFSPENLAKTSIKLNGQAELFYRPKSRMKRMAH
RLGEKMLNKKLKDQKTPIPDTLYQELYDYVNHRLSHDLSDEARALLPNVI
TKEVSHEIIKDRRFTSDKFFFHVPITLNYQAANSPSKFNQRVNAYLKEHP
ETPIIGIDRGERNLIYITVIDSTGKILEQRSLNTIQQFDYQKKLDNREKE
RVAARQAWSVVGTIKDLKQGYLSQVIHEIVDLMIHYQAVVVLENLNFGFK
SKRTGIAEKAVYQQFEKMLIDKLNCLVLKDYPAEKVGGVLNPYQLTDQFT
SFAKMGTQSGFLFYVPAPYTSKIDPLTGFVDPFVWKTIKNHESRKHFLEG
FDFLHYDVKTGDFILHFKMNRNLSFQRGLPGFMPAWDIVFEKNETQFDAK
GTPFIAGKRIVPVIENHRFTGRYRDLYPANELIALLEEKGIVFRDGSNIL
PKLLENDDSHAIDTMVALIRSVLQMRNSNAATGEDYINSPVRDLNGVCFD
SRFQNPEWPMDADANGAYHIALKGQLLLNHLKESKDLKLQNGISNQDWLA
YIQELRN
AsCpf1(R912A)-Residue A912 is indicated in bold
underlining and residues 661-667 are indicated
in italics and underlining.

(SEQ ID NO: 2008)

TQFEGFTNLYQVSKTLRFELIPQGKTLKHIQEQGFIEEDKARNDHYKELK
PIIDRIYKTYADQCLQLVQLDWENLSAAIDSYRKEKTEETRNALIEEQAT
YRNAIHDYFIGRTDNLTDAINKRHAEIYKGLFKAELFNGKVLKQLGTVTT
TEHENALLRSFDKFTTYFSGFYENRKNVFSAEDISTAIPHRIVQDNFPKF
KENCHIFTRLITAVPSLREHFENVKKAIGIFVSTSIEEVFSFPFYNQLLT
QTQIDLYNQLLGGISREAGTEKIKGLNEVLNLAIQKNDETAHIIASLPHR
FIPLFKQILSDRNTLSFILEEFKSDEEVIQSFCKYKTLLRNENVLETAEA
LFNELNSIDLTHIFISHKKLETISSALCDHWDTLRNALYERRISELTGKI
TKSAKEKVQRSLKHEDINLQEIISAAGKELSEAFKQKTSEILSHAHAALD
QPLPTTMLKKQEEKEILKSQLDSLLGLYHLLDWFAVDESNEVDPEFSARL
TGIKLEMEPSLSFYNKARNYATKKPYSVEKFKLNFQMPTLASGWDVNKEK
NNGAILFVKNGLYYLGIMPKQKGRYKALSFEPTEKTSEGFDKMYYDYFPD
AAKMIPKCSTQLKAVTAHFQTHTTPILLSNNFIEPLEITKEIYDLNNPEK
EPKKFQTAYAKKTGDQKGYREALCKWIDFTRDFLSKYTKTTSIDLSSLRP
SSQYKDLGEYYAELNPLLYHISFQRIAEKEIMDAVETGKLYLFQIYNKDF
AKGHHGKPNLHTLYWTGLFSPENLAKTSIKLNGQAELFYRPKSRMKRMAH
RLGEKMLNKKLKDQKTPIPDTLYQELYDYVNHRLSHDLSDEARALLPNVI
TKEVSHEIIKDRRFTSDKFFFHVPITLNYQAANSPSKFNQRVNAYLKEHP
ETPIIGIDRGEANLIYITVIDSTGKILEQRSLNTIQQFDYQKKLDNREKE
RVAARQAWSVVGTIKDLKQGYLSQVIHEIVDLMIHYQAVVVLENLNFGFK
SKRTGIAEKAVYQQFEKMLIDKLNCLVLKDYPAEKVGGVLNPYQLTDQFT
SFAKMGTQSGFLFYVPAPYTSKIDPLTGFVDPFVWKTIKNHESRKHFLEG
FDFLHYDVKTGDFILHFKMNRNLSFQRGLPGFMPAWDIVFEKNETQFDAK
GTPFIAGKRIVPVIENHRFTGRYRDLYPANELIALLEEKGIVFRDGSNIL
PKLLENDDSHAIDTMVALIRSVLQMRNSNAATGEDYINSPVRDLNGVCFD
SRFQNPEWPMDADANGAYHIALKGQLLLNHLKESKDLKLQNGISNQDWLA
YIQELRN

[0169] In some embodiments, the guide nucleotide sequence-programmable DNA binding protein is a Cpf1 protein from a Lachnospiraceae species (LbCpf1). Cpf1 proteins form Lachnospiraceae species have been described previously and would be apparent to the skilled artisan. Exemplary Lachnospiraceae Cpf1 proteins (LbCpf1) include, without limitation, any of the AsCpf1 proteins provided herein.

Wild-type LbCpf1-Residues R836 and R1138 is
indicated in bold underlining.

(SEQ ID NO: 2009)

MSKLEKFTNCYSLSKTLRFKAIPVGKTQENIDNKRLLVEDEKRAEDYKGV
KKLLDRYYLSFINDVLHSIKLKNLNNYISLFRKKTRTEKENKELENLEIN
LRKEIAKAFKGNEGYKSLFKKDIIETILPEFLDDKDEIALVNSFNGFTTA
FTGFFDNRENMFSEEAKSTSIAFRCINENLTRYISNMDIFEKVDAIFDKH
EVQEIKEKILNSDYDVEDFFEGEFFNFVLTQEGIDVYNAIIGGFVTESGE
KIKGLNEYINLYNQKTKQKLPKFKPLYKQVLSDRESLSFYGEGYTSDEEV
LEVFRNTLNKNSEIFSSIKKLEKLFKNFDEYSSAGIFVKNGPAISTISKD
IFGEWNVIRDKWNAEYDDIHLKKKAVVTEKYEDDRRKSFKKIGSFSLEQL
QEYADADLSVVEKLKEIIIQKVDEIYKVYGSSEKLFDADFVLEKSLKKND
AVVAIMKDLLDSVKSFENYIKAFFGEGKETNRDESFYGDFVLAYDILLKV
DHIYDAIRNYVTQKPYSKDKFKLYFQNPQFMGGWDKDKETDYRATILRYG
SKYYLAIMDKKYAKCLQKIDKDDVNGNYEKINYKLLPGPNKMLPKVFFSK
KWMAYYNPSEDIQKIYKNGTFKKGDMFNLNDCHKLIDFFKDSISRYPKWS
NAYDFNFSETEKYKDIAGFYREVEEQGYKVSFESASKKEVDKLVEEGKLY
MFQIYNKDFSDKSHGTPNLHTMYFKLLFDENNHGQIRLSGGAELFMRRAS
LKKEELVVHPANSPIANKNPDNPKKTTTLSYDVYKDKRFSEDQYELHIPI
AINKCPKNIFKINTEVRVLLKHDDNPYVIGIDRGERNLLYIVVVDGKGNI
VEQYSLNEIINNFNGIRIKTDYHSLLDKKEKERFEARQNWTSIENIKELK
AGYISQVVHKICELVEKYDAVIALEDLNSGFKNSRVKVEKQVYQKFEKML
IDKLNYMVDKKSNPCATGGALKGYQITNKFESFKSMSTQNGFIFYIPAWL
TSKIDPSTGFVNLLKTKYTSIADSKKFISSFDRIMYVPEEDLFEFALDYK
NFSRTDADYIKKWKLYSYGNRIRIFRNPKKNNVFDWEEVCLTSAYKELFN
KYGINYQQGDIRALLCEQSDKAFYSSFMALMSLMLQMRNSITGRTDVDFL
ISPVKNSDGIFYDSRNYEAQENAILPKNADANGAYNIARKVLWAIGQFKK
AEDEKLDKVKIAISNKEWLEYAQTSVKH
LbCpf1 (R836A)-Residue A836 is indicated in
bold underlining.
(SEQ ID NO: 2010)
MSKLEKFTNCYSLSKTLRFKAIPVGKTQENIDNKRLLVEDEKRAEDYKGV
KKLLDRYYLSFINDVLHSIKLKNLNNYISLFRKKTRTEKENKELENLEIN
LRKEIAKAFKGNEGYKSLFKKDIIETILPEFLDDKDEIALVNSFNGFTTA
FTGFFDNRENMFSEEAKSTSIAFRCINENLTRYISNMDIFEKVDAIFDKH
EVQEIKEKILNSDYDVEDFFEGEFFNFVLTQEGIDVYNAIIGGFVTESGE
KIKGLNEYINLYNQKTKQKLPKFKPLYKQVLSDRESLSFYGEGYTSDEEV
LEVFRNTLNKNSEIFSSIKKLEKLFKNFDEYSSAGIFVKNGPAISTISKD
IFGEWNVIRDKWNAEYDDIHLKKKAVVTEKYEDDRRKSFKKIGSFSLEQL
QEYADADLSVVEKLKEIIIQKVDEIYKVYGSSEKLFDADFVLEKSLKKND
AVVAIMKDLLDSVKSFENYIKAFFGEGKETNRDESFYGDFVLAYDILLKV
DHIYDAIRNYVTQKPYSKDKFKLYFQNPQFMGGWDKDKETDYRATILRYG
SKYYLAIMDKKYAKCLQKIDKDDVNGNYEKINYKLLPGPNKMLPKVFFSK
KWMAYYNPSEDIQKIYKNGTFKKGDMFNLNDCHKLIDFFKDSISRYPKWS
NAYDFNFSETEKYKDIAGFYREVEEQGYKVSFESASKKEVDKLVEEGKLY
MFQIYNKDFSDKSHGTPNLHTMYFKLLFDENNHGQIRLSGGAELFMRRAS
LKKEELVVHPANSPIANKNPDNPKKTTTLSYDVYKDKRFSEDQYELHIPI
AINKCPKNIFKINTEVRVLLKHDDNPYVIGIDRGEANLLYIVVVDGKGNI
VEQYSLNEIINNFNGIRIKTDYHSLLDKKEKERFEARQNWTSIENIKELK
AGYISQVVHKICELVEKYDAVIALEDLNSGFKNSRVKVEKQVYQKFEKML
IDKLNYMVDKKSNPCATGGALKGYQITNKFESFKSMSTQNGFIFYIPAWL
TSKIDPSTGFVNLLKTKYTSIADSKKFISSFDRIMYVPEEDLFEFALDYK
NFSRTDADYIKKWKLYSYGNRIRIFRNPKKNNVFDWEEVCLTSAYKELFN
KYGINYQQGDIRALLCEQSDKAFYSSFMALMSLMLQMRNSITGRTDVDFL
ISPVKNSDGIFYDSRNYEAQENAILPKNADANGAYNIARKVLWAIGQFKK
AEDEKLDKVKIAISNKEWLEYAQTSVKH
LbCpf1 (R1138A)-Residue A1138 is indicated in
bold underlining.

(SEQ ID NO: 2011)

MSKLEKFTNCYSLSKTLRFKAIPVGKTQENIDNKRLLVEDEKRAEDYKGV
KKLLDRYYLSFINDVLHSIKLKNLNNYISLFRKKTRTEKENKELENLEIN
LRKEIAKAFKGNEGYKSLFKKDIIETILPEFLDDKDEIALVNSFNGFTTA
FTGFFDNRENMFSEEAKSTSIAFRCINENLTRYISNMDIFEKVDAIFDKH
EVQEIKEKILNSDYDVEDFFEGEFFNFVLTQEGIDVYNAIIGGFVTESGE
KIKGLNEYINLYNQKTKQKLPKFKPLYKQVLSDRESLSFYGEGYTSDEEV
LEVFRNTLNKNSEIFSSIKKLEKLFKNFDEYSSAGIFVKNGPAISTISKD
IFGEWNVIRDKWNAEYDDIHLKKKAVVTEKYEDDRRKSFKKIGSFSLEQL
QEYADADLSVVEKLKEIIIQKVDEIYKVYGSSEKLFDADFVLEKSLKKND
AVVAIMKDLLDSVKSFENYIKAFFGEGKETNRDESFYGDFVLAYDILLKV
DHIYDAIRNYVTQKPYSKDKFKLYFQNPQFMGGWDKDKETDYRATILRYG
SKYYLAIMDKKYAKCLQKIDKDDVNGNYEKINYKLLPGPNKMLPKVFFSK
KWMAYYNPSEDIQKIYKNGTFKKGDMFNLNDCHKLIDFFKDSISRYPKWS
NAYDFNFSETEKYKDIAGFYREVEEQGYKVSFESASKKEVDKLVEEGKLY
MFQIYNKDFSDKSHGTPNLHTMYFKLLFDENNHGQIRLSGGAELFMRRAS
LKKEELVVHPANSPIANKNPDNPKKTTTLSYDVYKDKRFSEDQYELHIPI
AINKCPKNIFKINTEVRVLLKHDDNPYVIGIDRGERNLLYIVVVDGKGNI
VEQYSLNEIINNFNGIRIKTDYHSLLDKKEKERFEARQNWTSIENIKELK
AGYISQVVHKICELVEKYDAVIALEDLNSGFKNSRVKVEKQVYQKFEKML
IDKLNYMVDKKSNPCATGGALKGYQITNKFESFKSMSTQNGFIFYIPAWL
TSKIDPSTGFVNLLKTKYTSIADSKKFISSFDRIMYVPEEDLFEFALDYK
NFSRTDADYIKKWKLYSYGNRIRIFRNPKKNNVFDWEEVCLTSAYKELFN
KYGINYQQGDIRALLCEQSDKAFYSSFMALMSLMLQMANSITGRTDVDFL
ISPVKNSDGIFYDSRNYEAQENAILPKNADANGAYNIARKVLWAIGQFKK
AEDEKLDKVKIAISNKEWLEYAQTSVKH

[0170] In some embodiments, the Cpf1 protein is a crippled Cpf1 protein. As used herein, a “crippled Cpf1” protein is a Cpf1 protein having diminished nuclease activity as compared to a wild-type Cpf1 protein. In some embodiments, the crippled Cpf1 protein preferentially cuts the target strand more efficiently than the non-target strand. For example, the Cpf1 protein preferentially cuts the strand of a duplexed nucleic acid molecule in which a nucleotide to be edited resides. In some embodiments, the crippled Cpf1 protein preferentially cuts the non-target strand more efficiently than the target strand. For example, the Cpf1 protein preferentially cuts the strand of a duplexed nucleic acid molecule in which a nucleotide to be edited does not reside. In some embodiments, the crippled Cpf1 protein preferentially cuts the target strand at least 5% more efficiently than it cuts the non-target strand. In some embodiments, the crippled Cpf1 protein preferentially cuts the target strand at least 5%, at least 10%, at least 15%, at least 20%, at least 25%, at least 30%, at least 35%, at least 40%, at least 50%, at least 60%, at least 70%, at least 80%, at least 90%, or at least 100% more efficiently than it cuts the non-target strand.

[0171] In some embodiments, a crippled Cpf1 protein is a non-naturally occurring Cpf1 protein. In some embodiments, the crippled Cpf1 protein comprises one or more mutations relative to a wild-type Cpf1 protein. In some embodiments, the crippled Cpf1 protein comprises 1, 2, 3, 4, 5, 6, 7, 8, 9, 10, 11, 12, 13, 14, 15, 16, 17, 18, 19, or 20 mutations relative to a wild-type Cpf1 protein. In some embodiments, the crippled Cpf1 protein comprises an R836A mutation mutation as set forth in SEQ ID NO: 2009, or in a corresponding amino acid in another Cpf1 protein. It should be appreciated that a Cpf1 comprising a homologous residue (e.g., a corresponding amino acid) to R836A of SEQ ID NO: 2009 could also be mutated to achieve similar results. In some embodiments, the crippled Cpf1 protein comprises a R1138A mutation as set forth in SEQ ID NO: 2009, or in a corresponding amino acid in another Cpf1 protein. In some embodiments, the crippled Cpf1 protein comprises an R912A mutation mutation as set forth in SEQ ID NO: 2007, or in a corresponding amino acid in another Cpf1 protein. Without wishing to be bound by any particular theory, residue R838 of SEQ ID NO: 2009 (LbCpf1) and residue R912 of SEQ ID NO: 2007 (AsCpf1) are examples of corresponding (e.g., homologous) residues. For example, a portion of the alignment between SEQ ID NO: 2007 and 2009 shows that R912 and R838 are corresponding residues.

| | |
|---|---|
| AsCpf1 | YQAANSPSKFNQRVNAYLKEHPETPIIGIDRGERNLIYITVIDSTGKILEQRSLNTIQ-- |
| LbCpf1 | KCPKN-IFKINTEVRVLLKHDDNPYVIGIDRGERNLLYIVVVDGKGNIVEQYSLNEIINN |
| | * *:* .*.. **.. : :**********:**.*:*..*:*:** *** * |

[0172] In some embodiments, any of the Cpf1 proteins provided herein comprises one or more amino acid deletions. In some embodiments, any of the Cpf1 proteins provided herein comprises 1, 2, 3, 4, 5, 6, 7, 8, 9, 10, 11, 12, 13, 14, 15, 16, 17, 18, 19, or 20 amino acid deletions. Without wishing to be bound by any particular theory, there is a helical region in Cpf1, which includes residues 661-667 of AsCpf1 (SEQ ID NO: 2007), that may obstruct the function of a deaminase (e.g., APOBEC) that is fused to the Cpf1. This region comprises the amino acid sequence KKTGDQK. Accordingly, aspects of the disclosure provide Cpf1 proteins comprising mutations (e.g., deletions) that disrupt this helical region in Cpf1. In some embodiments, the Cpf1 protein comprises one or more deletions of the following residues in SEQ ID NO: 2007, or one or more corresponding deletions in another Cpf1 protein: K661, K662, T663, G664, D665, Q666, and K667. In some embodiments, the Cpf1 protein comprises a T663 and a D665 deletion in SEQ ID NO: 2007, or corresponding deletions in another Cpf1 protein. In some embodiments, the Cpf1 protein comprises a K662, T663, D665, and Q666 deletion in SEQ ID NO: 2007, or corresponding deletions in another Cpf1 protein. In some embodiments, the Cpf1 protein comprises a K661, K662, T663, D665, Q666 and K667 deletion in SEQ ID NO: 2007, or corresponding deletions in another Cpf1 protein.

AsCpf1 (deleted T663 and D665)

(SEQ ID NO: 2012)

TQFEGFTNLYQVSKTLRFELIPQGKTLKHIQEQGFIEEDKARNDHYKELK
PIIDRIYKTYADQCLQLVQLDWENLSAAIDSYRKEKTEETRNALIEEQAT
YRNAIHDYFIGRTDNLTDAINKRHAEIYKGLFKAELFNGKVLKQLGTVTT
TEHENALLRSFDKFTTYFSGFYENRKNVFSAEDISTAIPHRIVQDNFPKF
KENCHIFTRLITAVPSLREHFENVKKAIGIFVSTSIEEVFSFPFYNQLLT
QTQIDLYNQLLGGISREAGTEKIKGLNEVLNLAIQKNDETAHIIASLPHR
FIPLFKQILSDRNTLSFILEEFKSDEEVIQSFCKYKTLLRNENVLETAEA
LFNELNSIDLTHIFISHKKLETISSALCDHWDTLRNALYERRISELTGKI
TKSAKEKVQRSLKHEDINLQEIISAAGKELSEAFKQKTSEILSHAHAALD
QPLPTTMLKKQEEKEILKSQLDSLLGLYHLLDWFAVDESNEVDPEFSARL
TGIKLEMEPSLSFYNKARNYATKKPYSVEKFKLNFQMPTLASGWDVNKEK
NNGAILFVKNGLYYLGIMPKQKGRYKALSFEPTEKTSEGFDKMYYDYFPD
AAKMIPKCSTQLKAVTAHFQTHTTPILLSNNFIEPLEITKEIYDLNNPEK
EPKKFQTAYAKKGQKGYREALCKWIDFTRDFLSKYTKTTSIDLSSLRPSS
QYKDLGEYYAELNPLLYHISFQRIAEKEIMDAVETGKLYLFQIYNKDFAK
GHHGKPNLHTLYWTGLFSPENLAKTSIKLNGQAELFYRPKSRMKRMAHRL
GEKMLNKKLKDQKTPIPDTLYQELYDYVNHRLSHDLSDEARALLPNVITK
EVSHEIIKDRRFTSDKFFFHVPITLNYQAANSPSKFNQRVNAYLKEHPET
PIIGIDRGERNLIYITVIDSTGKILEQRSLNTIQQFDYQKKLDNREKERV
AARQAWSVVGTIKDLKQGYLSQVIHEIVDLMIHYQAVVVLENLNFGFKSK
RTGIAEKAVYQQFEKMLIDKLNCLVLKDYPAEKVGGVLNPYQLTDQFTSF
AKMGTQSGFLFYVPAPYTSKIDPLTGFVDPFVWKTIKNHESRKHFLEGFD
FLHYDVKTGDFILHFKMNRNLSFQRGLPGFMPAWDIVFEKNETQFDAKGT
PFIAGKRIVPVIENHRFTGRYRDLYPANELIALLEEKGIVFRDGSNILPK
LLENDDSHAIDTMVALIRSVLQMRNSNAATGEDYINSPVRDLNGVCFDSR
FQNPEWPMDADANGAYHIALKGQLLLNHLKESKDLKLQNGISNQDWLAYI
QELRN
AsCpf1 (deleted K662, T663, D665, and Q666)

(SEQ ID NO: 2013)

TQFEGFTNLYQVSKTLRFELIPQGKTLKHIQEQGFIEEDKARNDHYKELK
PIIDRIYKTYADQCLQLVQLDWENLSAAIDSYRKEKTEETRNALIEEQAT
YRNAIHDYFIGRTDNLTDAINKRHAEIYKGLFKAELFNGKVLKQLGTVTT
TEHENALLRSFDKFTTYFSGFYENRKNVFSAEDISTAIPHRIVQDNFPKF
KENCHIFTRLITAVPSLREHFENVKKAIGIFVSTSIEEVFSFPFYNQLLT
QTQIDLYNQLLGGISREAGTEKIKGLNEVLNLAIQKNDETAHIIASLPHR
FIPLFKQILSDRNTLSFILEEFKSDEEVIQSFCKYKTLLRNENVLETAEA
LFNELNSIDLTHIFISHKKLETISSALCDHWDTLRNALYERRISELTGKI
TKSAKEKVQRSLKHEDINLQEIISAAGKELSEAFKQKTSEILSHAHAALD
QPLPTTMLKKQEEKEILKSQLDSLLGLYHLLDWFAVDESNEVDPEFSARL
TGIKLEMEPSLSFYNKARNYATKKPYSVEKFKLNFQMPTLASGWDVNKEK
NNGAILFVKNGLYYLGIMPKQKGRYKALSFEPTEKTSEGFDKMYYDYFPD
AAKMIPKCSTQLKAVTAHFQTHTTPILLSNNFIEPLEITKEIYDLNNPEK
EPKKFQTAYAKGKGYREALCKWIDFTRDFLSKYTKTTSIDLSSLRPSSQY
KDLGEYYAELNPLLYHISFQRIAEKEIMDAVETGKLYLFQIYNKDFAKGH
HGKPNLHTLYWTGLFSPENLAKTSIKLNGQAELFYRPKSRMKRMAHRLGE
KMLNKKLKDQKTPIPDTLYQELYDYVNHRLSHDLSDEARALLPNVITKEV
SHEIIKDRRFTSDKFFFHVPITLNYQAANSPSKFNQRVNAYLKEHPETPI
IGIDRGERNLIYITVIDSTGKILEQRSLNTIQQFDYQKKLDNREKERVAA
RQAWSVVGTIKDLKQGYLSQVIHEIVDLMIHYQAVVVLENLNFGFKSKRT
GIAEKAVYQQFEKMLIDKLNCLVLKDYPAEKVGGVLNPYQLTDQFTSFAK
MGTQSGFLFYVPAPYTSKIDPLTGFVDPFVWKTIKNHESRKHFLEGFDFL
HYDVKTGDFILHFKMNRNLSFQRGLPGFMPAWDIVFEKNETQFDAKGTPF
IAGKRIVPVIENHRFTGRYRDLYPANELIALLEEKGIVFRDGSNILPKLL
ENDDSHAIDTMVALIRSVLQMRNSNAATGEDYINSPVRDLNGVCFDSRFQ
NPEWPMDADANGAYHIALKGQLLLNHLKESKDLKLQNGISNQDWLAYIQE
LRN
AsCpf1 (deleted K661, K662, T663, D665, Q666,
and K667)

(SEQ ID NO: 2014)

TQFEGFTNLYQVSKTLRFELIPQGKTLKHIQEQGFIEEDKARNDHYKELK
PIIDRIYKTYADQCLQLVQLDWENLSAAIDSYRKEKTEETRNALIEEQAT
YRNAIHDYFIGRTDNLTDAINKRHAEIYKGLFKAELFNGKVLKQLGTVTT
TEHENALLRSFDKFTTYFSGFYENRKNVFSAEDISTAIPHRIVQDNFPKF
KENCHIFTRLITAVPSLREHFENVKKAIGIFVSTSIEEVFSFPFYNQLLT
QTQIDLYNQLLGGISREAGTEKIKGLNEVLNLAIQKNDETAHIIASLPHR
FIPLFKQILSDRNTLSFILEEFKSDEEVIQSFCKYKTLLRNENVLETAEA
LFNELNSIDLTHIFISHKKLETISSALCDHWDTLRNALYERRISELTGKI
TKSAKEKVQRSLKHEDINLQEIISAAGKELSEAFKQKTSEILSHAHAALD
QPLPTTMLKKQEEKEILKSQLDSLLGLYHLLDWFAVDESNEVDPEFSARL
TGIKLEMEPSLSFYNKARNYATKKPYSVEKFKLNFQMPTLASGWDVNKEK
NNGAILFVKNGLYYLGIMPKQKGRYKALSFEPTEKTSEGFDKMYYDYFPD
AAKMIPKCSTQLKAVTAHFQTHTTPILLSNNFIEPLEITKEIYDLNNPEK
EPKKFQTAYAGGYREALCKWIDFTRDFLSKYTKTTSIDLSSLRPSSQYKD
LGEYYAELNPLLYHISFQRIAEKEIMDAVETGKLYLFQIYNKDFAKGHHG
KPNLHTLYWTGLFSPENLAKTSIKLNGQAELFYRPKSRMKRMAHRLGEKM
LNKKLKDQKTPIPDTLYQELYDYVNHRLSHDLSDEARALLPNVITKEVSH
EIIKDRRFTSDKFFFHVPITLNYQAANSPSKFNQRVNAYLKEHPETPIIG
IDRGERNLIYITVIDSTGKILEQRSLNTIQQFDYQKKLDNREKERVAARQ
AWSVVGTIKDLKQGYLSQVIHEIVDLMIHYQAVVVLENLNFGFKSKRTGI
AEKAVYQQFEKMLIDKLNCLVLKDYPAEKVGGVLNPYQLTDQFTSFAKMG
TQSGFLFYVPAPYTSKIDPLTGFVDPFVWKTIKNHESRKHFLEGFDFLHY
DVKTGDFILHFKMNRNLSFQRGLPGFMPAWDIVFEKNETQFDAKGTPFIA
GKRIVPVIENHRFTGRYRDLYPANELIALLEEKGIVFRDGSNILPKLLEN
DDSHAIDTMVALIRSVLQMRNSNAATGEDYINSPVRDLNGVCFDSRFQNP
EWPMDADANGAYHIALKGQLLLNHLKESKDLKLQNGISNQDWLAYIQELR
N

[0173] In some embodiments, the guide nucleotide sequence-programmable DNA-binding protein domain of the present disclosure has no requirements for a PAM sequence. One example of such guide nucleotide sequence-programmable DNA-binding protein may be an Argonaute protein from Natronobacterium gregoryi (NgAgo). NgAgo is a ssDNA-guided endonuclease. NgAgo binds 5′ phosphorylated ssDNA of ˜24 nucleotides (gDNA) to guide it to its target site and will make DNA double-strand breaks at gDNA site. In contrast to Cas9, the NgAgo-gDNA system does not require a protospacer-adjacent motif (PAM). Using a nuclease inactive NgAgo (dNgAgo) can greatly expand the codons that may be targeted. The characterization and use of NgAgo have been described in Gao et al., Nat Biotechnol. Epub 2016 May 2. PubMed PMID: 27136078; Swarts et al., Nature. 507(7491) (2014):258-61; and Swarts et al., Nucleic Acids Res. 43(10) (2015):5120-9, each of which are incorporated herein by reference. The sequence of Natronobacterium gregoryi Argonaute is provided in SEQ ID NO: 270.

Wild type Natronobacterium gregoryi Argonaute

(SEQ ID NO: 270)

MTVIDLDSTTTADELTSGHTYDISVTLTGVYDNTDEQHPRMSLAFEQDNG
ERRYITLWKNTTPKDVFTYDYATGSTYIFTNIDYEVKDGYENLTATYQTT
VENATAQEVGTTDEDETFAGGEPLDHHLDDALNETPDDAETESDSGHVMT
SFASRDQLPEWTLHTYTLTATDGAKTDTEYARRTLAYTVRQELYTDHDAA
PVATDGLMLLTPEPLGETPLDLDCGVRVEADETRTLDYTTAKDRLLAREL
VEEGLKRSLWDDYLVRGIDEVLSKEPVLTCDEFDLHERYDLSVEVGHSGR
AYLHINFRHRFVPKLTLADIDDDNIYPGLRVKTTYRPRRGHIVWGLRDEC
ATDSLNTLGNQSVVAYHRNNQTPINTDLLDAIEAADRRVVETRRQGHGDD
AVSFPQELLAVEPNTHQIKQFASDGFHQQARSKTRLSASRCSEKAQAFAE
RLDPVRLNGSTVEFSSEFFTGNNEQQLRLLYENGESVLTFRDGARGAHPD
ETFSKGIVNPPESFEVAVVLPEQQADTCKAQWDTMADLLNQAGAPPTRSE
TVQYDAFSSPESISLNVAGAIDPSEVDAAFVVLPPDQEGFADLASPTETY
DELKKALANMGIYSQMAYFDRFRDAKIFYTRNVALGLLAAAGGVAFTTEH
AMPGDADMFIGIDVSRSYPEDGASGQINIAATATAVYKDGTILGHSSTRP
QLGEKLQSTDVRDIMKNAILGYQQVTGESPTHIVIHRDGFMNEDLDPATE
FLNEQGVEYDIVEIRKQPQTRLLAVSDVQYDTPVKSIAAINQNEPRATVA
TFGAPEYLATRDGGGLPRPIQIERVAGETDIETLTRQVYLLSQSHIQVHN
STARLPITTAYADQASTHATKGYLVQTGAFESNVGFL

[0174] In some embodiments, the guide nucleotide sequence-programmable DNA-binding protein is a prokaryotic homolog of an Argonaute protein. Prokaryotic homologs of Argonaute proteins are known and have been described, for example, in Makarova et al., “Prokaryotic homologs of Argonaute proteins are predicted to function as key components of a novel system of defense against mobile genetic elements”, Biol. Direct. 2009 Aug. 25; 4:29. doi: 10.1186/1745-6150-4-29, which is incorporated herein by reference. In some embodiments, the guide nucleotide sequence-programmable DNA-binding protein is a Marinitoga piezophila Argunaute (MpAgo) protein. The CRISPR-associated Marinitoga piezophila Argonaute (MpAgo) protein cleaves single-stranded target sequences using 5′-phosphorylated guides. The 5′ guides are used by all known Argonautes. The crystal structure of an MpAgo-RNA complex shows a guide strand binding site comprising residues that block 5′ phosphate interactions. This data suggests the evolution of an Argonaute subclass with noncanonical specificity for a 5′-hydroxylated guide. See, e.g., Kaya et al., “A bacterial Argonaute with noncanonical guide RNA specificity”, Proc Natl Acad Sci USA. 2016 Apr. 12; 113(15):4057-62, the entire contents of which are hereby incorporated by reference). It should be appreciated that other Argonaute proteins may be used in any of the fusion proteins (e.g., base editors) described herein, for example, to guide a deaminase (e.g., cytidine deaminase) to a target nucleic acid (e.g., ssRNA).

[0175] In some embodiments, the guide nucleotide sequence-programmable DNA-binding protein is a single effector of a microbial CRISPR-Cas system. Single effectors of microbial CRISPR-Cas systems include, without limitation, Cas9, Cpf1, C2c1, C2c2, and C2c3. Typically, microbial CRISPR-Cas systems are divided into Class 1 and Class 2 systems. Class 1 systems have multisubunit effector complexes, while Class 2 systems have a single protein effector. Cas9 and Cpf1 are Class 2 effectors. In addition to Cas9 and Cpf1, three distinct Class 2 CRISPR-Cas systems (C2c1, C2c2, and C2c3) have been described by Shmakov et al., “Discovery and Functional Characterization of Diverse Class 2 CRISPR Cas Systems”, Mol. Cell, 2015 Nov. 5; 60(3): 385-397, the entire contents of which are herein incorporated by reference. Effectors of two of the systems, C2c1 and C2c3, contain RuvC-like endonuclease domains related to Cpf1. A third system, C2c2 contains an effector with two predicted HEPN RNase domains. Production of mature CRISPR RNA is tracrRNA-independent, unlike production of CRISPR RNA by C2c1. C2c1 depends on both CRISPR RNA and tracrRNA for DNA cleavage. Bacterial C2c2 has been shown to possess a unique RNase activity for CRISPR RNA maturation distinct from its RNA-activated single-stranded RNA degradation activity. These RNase functions are different from each other and from the CRISPR RNA-processing behavior of Cpf1. See, e.g., East-Seletsky, et al., “Two distinct RNase activities of CRISPR-C2c2 enable guide-RNA processing and RNA detection”, Nature, 2016 Oct. 13; 538(7624):270-273, the entire contents of which are hereby incorporated by reference. In vitro biochemical analysis of C2c2 in Leptotrichia shahii has shown that C2c2 is guided by a single CRISPR RNA and can be programmed to cleave ssRNA targets carrying complementary protospacers. Catalytic residues in the two conserved HEPN domains mediate cleavage. Mutations in the catalytic residues generate catalytically inactive RNA-binding proteins. See e.g., Abudayyeh et al., “C2c2 is a single-component programmable RNA-guided RNA-targeting CRISPR effector,” Science, 2016 Aug. 5; 353(6299), the entire contents of which are hereby incorporated by reference.

[0176] The crystal structure of Alicyclobaccillus acidoterrastris C2c1 (AacC2c1) has been reported in complex with a chimeric single-molecule guide RNA (sgRNA). See, e.g., Liu et al., “C2c1-sgRNA Complex Structure Reveals RNA-Guided DNA Cleavage Mechanism”, Mol. Cell, 2017 Jan. 19; 65(2):310-322, incorporated herein by reference. The crystal structure has also been reported for Alicyclobacillus acidoterrestris C2c1 bound to target DNAs as ternary complexes. See, e.g., Yang et al., “PAM-dependent Target DNA Recognition and Cleavage by C2C1 CRISPR-Cas endonuclease”, Cell, 2016 Dec. 15; 167(7):1814-1828, the entire contents of which are hereby incorporated by reference. Catalytically competent conformations of AacC2c1, both with target and non-target DNA strands, have been captured independently positioned within a single RuvC catalytic pocket, with C2c1-mediated cleavage resulting in a staggered seven-nucleotide break of target DNA. Structural comparisons between C2c1 ternary complexes and previously identified Cas9 and Cpf1 counterparts demonstrate the diversity of mechanisms used by CRISPR-Cas9 systems.

[0177] In some embodiments, the guide nucleotide sequence-programmable DNA-binding protein of any of the fusion proteins provided herein is a C2c1, a C2c2, or a C2c3 protein. In some embodiments, the guide nucleotide sequence-programmable DNA-binding protein is a C2c1 protein. In some embodiments, the guide nucleotide sequence-programmable DNA-binding protein is a C2c2 protein. In some embodiments, the guide nucleotide sequence-programmable DNA-binding protein is a C2c3 protein. In some embodiments, the guide nucleotide sequence-programmable DNA-binding protein comprises an amino acid sequence that is at least 85%, at least 90%, at least 91%, at least 92%, at least 93%, at least 94%, at least 95%, at least 96%, at least 97%, at least 98%, at least 99%, or at least 99.5% identical to a naturally-occurring C2c1, C2c2, or C2c3 protein. In some embodiments, the guide nucleotide sequence-programmable DNA-binding protein is a naturally-occurring C2c1, C2c2, or C2c3 protein. In some embodiments, the guide nucleotide sequence-programmable DNA-binding protein comprises an amino acid sequence that is at least 85%, at least 90%, at least 91%, at least 92%, at least 93%, at least 94%, at least 95%, at least 96%, at least 97%, at least 98%, at least 99%, or at least 99.5% identical to any one of SEQ ID NOs: 2015-2017. In some embodiments, the guide nucleotide sequence-programmable DNA-binding protein comprises an amino acid sequence of any one SEQ ID NOs: 2015-2017. It should be appreciated that C2c1, C2c2, or C2c3 from other bacterial species may also be used in accordance with the present disclosure.

C2c1 (uniprot.org/uniprot/T0D7A2#)
sp|T0D7A2|C2C1_ALIAG CRISPR-associated endonuclease C2c1
OS = Alicyclobacillus acidoterrestris (strain ATCC 49025/DSM
3922/CIP 106132/NCIMB 13137/GD3B) GN = c2c1 PE = 1 SV = 1
(SEQ ID NO: 2015)
MAVKSIKVKLRLDDMPEIRAGLWKLHKEVNAGVRYYTEWLSLLRQENLYRRSPNGDG
EQECDKTAEECKAELLERLRARQVENGHRGPAGSDDELLQLARQLYELLVPQAIGAKG
DAQQIARKFLSPLADKDAVGGLGIAKAGNKPRWVRMREAGEPGWEEEKEKAETRKSA
DRTADVLRALADFGLKPLMRVYTDSEMSSVEWKPLRKGQAVRTWDRDMFQQAIERM
MSWESWNQRVGQEYAKLVEQKNRFEQKNFVGQEHLVHLVNQLQQDMKEASPGLESK
EQTAHYVTGRALRGSDKVFEKWGKLAPDAPFDLYDAEIKNVQRRNTRRFGSHDLFAKL
AEPEYQALWREDASFLTRYAVYNSILRKLNHAKMFATFTLPDATAHPIWTRFDKLGGN
LHQYTFLFNEFGERRHAIRFHKLLKVENGVAREVDDVTVPISMSEQLDNLLPRDPNEPIA
LYFRDYGAEQHFTGEFGGAKIQCRRDQLAHMHRRRGARDVYLNVSVRVQSQSEARGE
RRPPYAAVFRLVGDNHRAFVHFDKLSDYLAEHPDDGKLGSEGLLSGLRVMSVDLGLRT
SASISVFRVARKDELKPNSKGRVPFFFPIKGNDNLVAVHERSQLLKLPGETESKDLRAIRE
ERQRTLRQLRTQLAYLRLLVRCGSEDVGRRERSWAKLIEQPVDAANHMTPDWREAFEN
ELQKLKSLHGICSDKEWMDAVYESVRRVWRHMGKQVRDWRKDVRSGERPKIRGYAK
DVVGGNSIEQIEYLERQYKFLKSWSFFGKVSGQVIRAEKGSRFAITLREHIDHAKEDRLK
KLADRIIMEALGYVYALDERGKGKWVAKYPPCQLILLEELSEYQFNNDRPPSENNQLM
QWSHRGVFQELINQAQVHDLLVGTMYAAFSSRFDARTGAPGIRCRRVPARCTQEHNPE
PFPWWLNKFVVEHTLDACPLRADDLIPTGEGEIFVSPFSAEEGDFHQIHADLNAAQNLQ
QRLWSDFDISQIRLRCDWGEVDGELVLIPRLTGKRTADSYSNKVFYTNTGVTYYERERG
KKRRKVFAQEKLSEEEAELLVEADEAREKSVVLMRDPSGIINRGNWTRQKEFWSMVNQ
RIEGYLVKQIRSRVPLQDSACENTGDI
C2c2 (uniprot.org/uniprot/P0DOC6)
>sp|P0DOC6|C2C2_LEPSD CRISPR-associated endoribonuclease
C2c2 OS = Leptotrichia shahii (strain DSM 19757/CCUG 47503/CIP
107916/JCM 16776/LB37) GN = c2c2 PE = 1 SV = 1
(SEQ ID NO: 2016)
MGNLFGHKRWYEVRDKKDFKIKRKVKVKRNYDGNKYILNINENNNKEKIDNNKFIRKY
INYKKNDNILKEFTRKFHAGNILFKLKGKEGIIRIENNDDFLETEEVVLYIEAYGKSEKLK
ALGITKKKIIDEAIRQGITKDDKKIEIKRQENEEEIEIDIRDEYTNKTLNDCSIILRIIENDELE
TKKSIYEIFKNINMSLYKIIEKIIENETEKVFENRYYEEHLREKLLKDDKIDVILTNFMEIRE
KIKSNLEILGFVKFYLNVGGDKKKSKNKKMLVEKILNINVDLTVEDIADFVIKELEFWNI
TKRIEKVKKVNNEFLEKRRNRTYIKSYVLLDKHEKFKIERENKKDKIVKFFVENIKNNSI
KEKIEKILAEFKIDELIKKLEKELKKGNCDTEIFGIFKKHYKVNFDSKKFSKKSDEEKELY
KIIYRYLKGRIEKILVNEQKVRLKKMEKIEIEKILNESILSEKILKRVKQYTLEHIMYLGKL
RHNDIDMTTVNTDDFSRLHAKEELDLELITFFASTNMELNKIFSRENINNDENIDFFGGDR
EKNYVLDKKILNSKIKIIRDLDFIDNKNNITNNFIRKFTKIGTNERNRILHAISKERDLQGT
QDDYNKVINIIQNLKISDEEVSKALNLDVVFKDKKNIITKINDIKISEENNNDIKYLPSFSK
VLPEILNLYRNNPKNEPFDTIETEKIVLNALIYVNKELYKKLILEDDLEENESKNIFLQELK
KTLGNIDEIDENIIENYYKNAQISASKGNNKAIKKYQKKVIECYIGYLRKNYEELFDFSDF
KMNIQEIKKQIKDINDNKTYERITVKTSDKTIVINDDFEYIISIFALLNSNAVINKIRNRFFA
TSVWLNTSEYQNIIDILDEIMQLNTLRNECITENWNLNLEEFIQKMKEIEKDFDDFKIQTK
KEIFNNYYEDIKNNILTEFKDDINGCDVLEKKLEKIVIFDDETKFEIDKKSNILQDEQRKLS
NINKKDLKKKVDQYIKDKDQEIKSKILCRIIFNSDFLKKYKKEIDNLIEDMESENENKFQE
IYYPKERKNELYIYKKNLFLNIGNPNFDKIYGLISNDIKMADAKFLFNIDGKNIRKNKISEI
DAILKNLNDKLNGYSKEYKEKYIKKLKENDDFFAKNIQNKNYKSFEKDYNRVSEYKKIR
DLVEFNYLNKIESYLIDINWKLAIQMARFERDMHYIVNGLRELGIIKLSGYNTGISRAYPK
RNGSDGFYTTTAYYKFFDEESYKKFEKICYGFGIDLSENSEINKPENESIRNYISHFYIVRN
PFADYSIAEQIDRVSNLLSYSTRYNNSTYASVFEVFKKDVNLDYDELKKKFKLIGNNDIL
ERLMKPKKVSVLELESYNSDYIKNLIIELLTKIENTNDTL
C2c3, translated from >CEPX01008730.1 marine metagenome
genome assembly TARA_037_MES_0.1-0.22, contig
TARA_037_MES_0.1-0.22_scaffold22115_1, whole
genome shotgun sequence.
(SEQ ID NO: 2017)
MRSNYHGGRNARQWRKQISGLARRTKETVFTYKFPLETDAAEIDFDKAVQTYGIAEGV
GHGSLIGLVCAFHLSGFRLFSKAGEAMAFRNRSRYPTDAFAEKLSAIMGIQLPTLSPEGL
DLIFQSPPRSRDGIAPVWSENEVRNRLYTNWTGRGPANKPDEHLLEIAGEIAKQVFPKFG
GWDDLASDPDKALAAADKYFQSQGDFPSIASLPAAIMLSPANSTVDFEGDYIAIDPAAET
LLHQAVSRCAARLGRERPDLDQNKGPFVSSLQDALVSSQNNGLSWLFGVGFQHWKEKS
PKELIDEYKVPADQHGAVTQVKSFVDAIPLNPLFDTTHYGEFRASVAGKVRSWVANYW
KRLLDLKSLLATTEFTLPESISDPKAVSLFSGLLVDPQGLKKVADSLPARLVSAEEAIDRL
MGVGIPTAADIAQVERVADEIGAFIGQVQQFNNQVKQKLENLQDADDEEFLKGLKIELP
SGDKEPPAINRISGGAPDAAAEISELEEKLQRLLDARSEHFQTISEWAEENAVTLDPIAAM
VELERLRLAERGATGDPEEYALRLLLQRIGRLANRVSPVSAGSIRELLKPVFMEEREFNL
FFHNRLGSLYRSPYSTSRHQPFSIDVGKAKAIDWIAGLDQISSDIEKALSGAGEALGDQLR
DWINLAGFAISQRLRGLPDTVPNALAQVRCPDDVRIPPLLAMLLEEDDIARDVCLKAFN
LYVSAINGCLFGALREGFIVRTRFQRIGTDQIHYVPKDKAWEYPDRLNTAKGPINAAVSS
DWIEKDGAVIKPVETVRNLSSTGFAGAGVSEYLVQAPHDWYTPLDLRDVAHLVTGLPV
EKNITKLKRLTNRTAFRMVGASSFKTHLDSVLLSDKIKLGDFTIIIDQHYRQSVTYGGKV
KISYEPERLQVEAAVPVVDTRDRTVPEPDTLFDHIVAIDLGERSVGFAVFDIKSCLRTGEV
KPIHDNNGNPVVGTVAVPSIRRLMKAVRSHRRRRQPNQKVNQTYSTALQNYRENVIGD
VCNRIDTLMERYNAFPVLEFQIKNFQAGAKQLEIVYGS

[0178] In some embodiments, the guide nucleotide sequence-programmable DNA-binding protein of any of the fusion proteins provided herein is a Cas9 from archaea (e.g. nanoarchaea), which constitute a domain and kingdom of single-celled prokaryotic microbes. In some embodiments, the guide nucleotide sequence-programmable DNA-binding protein is CasX or CasY, which have been described in, for example, Burstein et al., “New CRISPR-Cas systems from uncultivated microbes.” Cell Res. 2017 February 21. doi: 10.1038/cr.2017.21, which is incorporated herein by reference. Using genome-resolved metagenomics, a number of CRISPR-Cas systems were identified, including the first reported Cas9 in the archaeal domain of life. This divergent Cas9 protein was found in nanoarchaea as part of an active CRISPR-Cas system. In bacteria, two previously unknown systems were discovered, CRISPR-CasX and CRISPR-CasY, which are among the most compact systems yet discovered. In some embodiments, Cas9 refers to CasX, or a variant of CasX. In some embodiments, Cas9 refers to a CasY, or a variant of CasY. It should be appreciated that other RNA-guided DNA binding proteins may be used as a guide nucleotide sequence-programmable DNA-binding protein and are within the scope of this disclosure.

[0179] In some embodiments, the guide nucleotide sequence-programmable DNA-binding protein of any of the fusion proteins provided herein is a CasX or CasY protein. In some embodiments, the guide nucleotide sequence-programmable DNA-binding protein is a CasX protein. In some embodiments, the guide nucleotide sequence-programmable DNA-binding protein is a CasY protein. In some embodiments, the guide nucleotide sequence-programmable DNA-binding protein comprises an amino acid sequence that is at least 85%, at least 90%, at least 91%, at least 92%, at least 93%, at least 94%, at least 95%, at least 96%, at least 97%, at least 98%, at least 99%, or at least 99.5% identical to a naturally-occurring CasX or CasY protein. In some embodiments, the guide nucleotide sequence-programmable DNA-binding protein is a naturally-occurring CasX or CasY protein. In some embodiments, the guide nucleotide sequence-programmable DNA-binding protein comprises an amino acid sequence that is at least 85%, at least 90%, at least 91%, at least 92%, at least 93%, at least 94%, at least 95%, at least 96%, at least 97%, at least 98%, at least 99%, or at least 99.5% identical to any one of SEQ ID NOs: 2018-2020. In some embodiments, the guide nucleotide sequence-programmable DNA-binding protein comprises an amino acid sequence of any one of SEQ ID NOs: 2018-2020. It should be appreciated that CasX and CasY from other bacterial species may also be used in accordance with the present disclosure.

CasX (uniprot.org/uniprot/F0NN87; uniprot.org/uniprot/F0NH53)
>tr|F0NN87|F0NN87_SULIH CRISPR-associated Casx protein
OS = Sulfolobus islandicus (strain HVE10/4) GN = SiH_0402
PE = 4 SV = 1
(SEQ ID NO: 2018)
MEVPLYNIFGDNYIIQVATEAENSTIYNNKVEIDDEELRNVLNLAYKIAKNNEDAAAERR
GKAKKKKGEEGETTTSNIILPLSGNDKNPWTETLKCYNFPTTVALSEVFKNFSQVKECEE
VSAPSFVKPEFYEFGRSPGMVERTRRVKLEVEPHYLIIAAAGWVLTRLGKAKVSEGDYV
GVNVFTPTRGILYSLIQNVNGIVPGIKPETAFGLWIARKVVSSVTNPNVSVVRIYTISDAV
GQNPTTINGGFSIDLTKLLEKRYLLSERLEAIARNALSISSNMRERYIVLANYIYEYLTGSK
RLEDLLYFANRDLIMNLNSDDGKVRDLKLISAYVNGELIRGEG
>tr|F0NH53|F0NH53_SULIR CRISPR associated protein, Casx
OS = Sulfolobus islandicus (strain REY15A) GN = SiRe_0771
PE = 4 SV = 1
(SEQ ID NO: 2019)
MEVPLYNIFGDNYIIQVATEAENSTIYNNKVEIDDEELRNVLNLAYKIAKNNEDAAAERR
GKAKKKKGEEGETTTSNIILPLSGNDKNPWTETLKCYNFPTTVALSEVFKNFSQVKECEE
VSAPSFVKPEFYKFGRSPGMVERTRRVKLEVEPHYLIMAAAGWVLTRLGKAKVSEGDY
VGVNVFTPTRGILYSLIQNVNGIVPGIKPETAFGLWIARKVVSSVTNPNVSVVSIYTISDA
VGQNPTTINGGFSIDLTKLLEKRDLLSERLEAIARNALSISSNMRERYIVLANYIYEYLTGS
KRLEDLLYFANRDLIMNLNSDDGKVRDLKLISAYVNGELIRGEG
CasY (ncbi.nlm.nih.gov/protein/APG80656.1)
>APG80656.1 CRISPR-associated protein CasY [uncultured
Parcubacteria group bacterium]
(SEQ ID NO: 2020)
MSKRHPRISGVKGYRLHAQRLEYTGKSGAMRTIKYPLYSSPSGGRTVPREIVSAINDDY
VGLYGLSNFDDLYNAEKRNEEKVYSVLDFWYDCVQYGAVFSYTAPGLLKNVAEVRGG
SYELTKTLKGSHLYDELQIDKVIKFLNKKEISRANGSLDKLKKDIIDCFKAEYRERHKDQ
CNKLADDIKNAKKDAGASLGERQKKLFRDFFGISEQSENDKPSFTNPLNLTCCLLPFDTV
NNNRNRGEVLFNKLKEYAQKLDKNEGSLEMWEYIGIGNSGTAFSNFLGEGFLGRLREN
KITELKKAMMDITDAWRGQEQEEELEKRLRILAALTIKLREPKFDNHWGGYRSDINGKL
SSWLQNYINQTVKIKEDLKGHKKDLKKAKEMINRFGESDTKEEAVVSSLLESIEKIVPDD
SADDEKPDIPAIAIYRRFLSDGRLTLNRFVQREDVQEALIKERLEAEKKKKPKKRKKKSD
AEDEKETIDFKELFPHLAKPLKLVPNFYGDSKRELYKKYKNAAIYTDALWKAVEKIYKS
AFSSSLKNSFFDTDFDKDFFIKRLQKIFSVYRRFNTDKWKPIVKNSFAPYCDIVSLAENEV
LYKPKQSRSRKSAAIDKNRVRLPSTENIAKAGIALARELSVAGFDWKDLLKKEEHEEYID
LIELHKTALALLLAVTETQLDISALDFVENGTVKDFMKTRDGNLVLEGRFLEMFSQSIVF
SELRGLAGLMSRKEFITRSAIQTMNGKQAELLYIPHEFQSAKITTPKEMSRAFLDLAPAEF
ATSLEPESLSEKSLLKLKQMRYYPHYFGYELTRTGQGIDGGVAENALRLEKSPVKKREIK
CKQYKTLGRGQNKIVLYVRSSYYQTQFLEWFLHRPKNVQTDVAVSGSFLIDEKKVKTR
WNYDALTVALEPVSGSERVFVSQPFTIFPEKSAEEEGQRYLGIDIGEYGIAYTALEITGDS
AKILDQNFISDPQLKTLREEVKGLKLDQRRGTFAMPSTKIARIRESLVHSLRNRIHHLALK
HKAKIVYELEVSRFEEGKQKIKKVYATLKKADVYSEIDADKNLQTTVWGKLAVASEISA
SYTSQFCGACKKLWRAEMQVDETITTQELIGTVRVIKGGTLIDAIKDFMRPPIFDENDTPF
PKYRDFCDKHHISKKMRGNSCLFICPFCRANADADIQASQTIALLRYVKEEKKVEDYFE
RFRKLKNIKVLGQMKKI

Cas9 Domains with Reduced PAM Exclusivity

[0180] Some aspects of the disclosure provide Cas9 domains that have different PAM specificities. Typically, Cas9 proteins, such as Cas9 from S. pyogenes (spCas9), require a canonical NGG PAM sequence to bind a particular nucleic acid region. This may limit the ability to edit desired bases within a genome. In some embodiments, the base editing fusion proteins provided herein may need to be placed at a precise location, for example where a target base is placed within a four base region (e.g., a “deamination window”), which is approximately 15 bases upstream of the PAM. See Komor, A. C., et al., “Programmable editing of a target base in genomic DNA without double-stranded DNA cleavage” Nature 533, 420-424 (2016), the entire contents of which are hereby incorporated by reference. Accordingly, in some embodiments, any of the fusion proteins provided herein may contain a Cas9 domain that is capable of binding a nucleotide sequence that does not contain a canonical (e.g., NGG) PAM sequence and has relaxed PAM requirements (PAMless Cas9). PAMless Cas9 exhibits an increased activity on a target sequence that does not include a canonical PAM (e.g., NGG) at its 3′-end as compared to Streptococcus pyogenes Cas9 as provided by SEQ ID NO: 1, e.g., increased activity by at least 5-fold, at least 10-fold, at least 50-fold, at least 100-fold, at least 500-fold, at least 1,000-fold, at least 5,000-fold, at least 10,000-fold, at least 50,000-fold, at least 100,000-fold, at least 500,000-fold, or at least 1,000,000-fold. Cas9 domains that bind to non-canonical PAM sequences have been described in the art and would be apparent to the skilled artisan. For example, Cas9 domains that bind non-canonical PAM sequences have been described in Kleinstiver, B. P., et al., “Engineered CRISPR-Cas9 nucleases with altered PAM specificities” Nature 523, 481-485 (2015); and Kleinstiver, B. P., et al., “Broadening the targeting range of Staphylococcus aureus CRISPR-Cas9 by modifying PAM recognition” Nature Biotechnology 33, 1293-1298 (2015); the entire contents of each are hereby incorporated by reference. See also U.S. Provisional Applications 62/245,828, 62/279,346, 62/311,763, 62/322,178, and 62/357,332, each of which is incorporated herein by reference. In some embodiments, the dCas9 or Cas9 nickase useful in the present disclosure may further comprise mutations that relax the PAM requirements, e.g., mutations that correspond to A262T, K294R, S409I, E480K, E543D, M694I, or E1219V in SEQ ID NO: 1.

[0181] In some embodiments, the Cas9 domain is a Cas9 domain from Staphylococcus aureus (SaCas9). In some embodiments, the SaCas9 domain is a nuclease active SaCas9, a nuclease inactive SaCas9 (SaCas9d), or a SaCas9 nickase (SaCas9n). In some embodiments, the SaCas9 comprises the amino acid sequence SEQ ID NO: 2021. In some embodiments, the SaCas9 comprises a N579X mutation of SEQ ID NO: 2021, or a corresponding mutation in any of the amino acid sequences provided in any of the Cas9 proteins disclosed herein including, but not limited to, SEQ ID NOs: 1-260, 2004, or 2006, wherein X is any amino acid except for N. In some embodiments, the SaCas9 comprises a N579A mutation of SEQ ID NO: 2021, or a corresponding mutation in any of the amino acid sequences provided in SEQ ID NOs: 1-260, 2004, or 2006. In some embodiments, the SaCas9 domain, the SaCas9d domain, or the SaCas9n domain can bind to a nucleic acid sequence having a non-canonical PAM. In some embodiments, the SaCas9 domain, the SaCas9d domain, or the SaCas9n domain can bind to a nucleic acid sequence having a NNGRRT PAM sequence. In some embodiments, the SaCas9 domain comprises one or more of a E781X, a N967X, and a R1014X mutation of SEQ ID NO: 2021, or a corresponding mutation in any of the Cas9 amino acid sequences provided herein, including but not limited to in SEQ ID NOs: 1-260, 2004, or 2006, wherein X is any amino acid. In some embodiments, the SaCas9 domain comprises one or more of a E781K, a N967K, and a R1014H mutation of SEQ ID NO: 2021, or one or more corresponding mutation in any of the Cas9 amino acid sequences provided herein, including but not limited to in SEQ ID NOs: 1-260, 2004, or 2006. In some embodiments, the SaCas9 domain comprises a E781K, a N967K, or a R1014H mutation of SEQ ID NO: 2021, or one or more corresponding mutation in any of the Cas9 amino acid sequences provided herein, including but not limited to in SEQ ID NOs: 1-260, 2004, or 2006.

[0182] In some embodiments, the Cas9 domain of any of the fusion proteins provided herein comprises an amino acid sequence that is at least 60%, at least 65%, at least 70%, at least 75%, at least 80%, at least 85%, at least 90%, at least 95%, at least 96%, at least 97%, at least 98%, at least 99%, or at least 99.5% identical to any one of SEQ ID NOs: 2021-2024 or 268. In some embodiments, the Cas9 domain of any of the fusion proteins provided herein comprises the amino acid sequence of any one of SEQ ID NOs: 2021-2024 or 268. In some embodiments, the Cas9 domain of any of the fusion proteins provided herein consists of the amino acid sequence of any one of SEQ ID NOs: 2021-2024 or 268.

Exemplary SaCas9 sequence
(SEQ ID NO: 2021)
KRNYILGLDIGITSVGYGIIDYETRDVIDAGVRLFKEANVENNEGRRSKRGARRLKRRRR
HRIQRVKKLLFDYNLLTDHSELSGINPYEARVKGLSQKLSEEEFSAALLHLAKRRGVHN
VNEVEEDTGNELSTKEQISRNSKALEEKYVAELQLERLKKDGEVRGSINRFKTSDYVKE
AKQLLKVQKAYHQLDQSFIDTYIDLLETRRTYYEGPGEGSPFGWKDIKEWYEMLMGHC
TYFPEELRSVKYAYNADLYNALNDLNNLVITRDENEKLEYYEKFQIIENVFKQKKKPTL
KQIAKEILVNEEDIKGYRVTSTGKPEFTNLKVYHDIKDITARKEIIENAELLDQIAKILTIY
QSSEDIQEELTNLNSELTQEEIEQISNLKGYTGTHNLSLKAINLILDELWHTNDNQIAIFNR
LKLVPKKVDLSQQKEIPTTLVDDFILSPVVKRSFIQSIKVINAIIKKYGLPNDIIIELAREKN
SKDAQKMINEMQKRNRQTNERIEEIIRTTGKENAKYLIEKIKLHDMQEGKCLYSLEAIPL
EDLLNNPFNYEVDHIIPRSVSFDNSFNNKVLVKQEENSKKGNRTPFQYLSSSDSKISYETF
KKHILNLAKGKGRISKTKKEYLLEERDINRFSVQKDFINRNLVDTRYATRGLMNLLRSYF
RVNNLDVKVKSINGGFTSFLRRKWKFKKERNKGYKHHAEDALIIANADFIFKEWKKLD
KAKKVMENQMFEEKQAESMPEIETEQEYKEIFITPHQIKHIKDFKDYKYSHRVDKKPNR
ELINDTLYSTRKDDKGNTLIVNNLNGLYDKDNDKLKKLINKSPEKLLMYHHDPQTYQK
LKLIMEQYGDEKNPLYKYYEETGNYLTKYSKKDNGPVIKKIKYYGNKLNAHLDITDDY
PNSRNKVVKLSLKPYRFDVYLDNGVYKFVTVKNLDVIKKENYYEVNSKCYEEAKKLK
KISNQAEFIASFYNNDLIKINGELYRVIGVNNDLLNRIEVNMIDITYREYLENMNDKRPPR
IIKTIASKTQSIKKYSTDILGNLYEVKSKKHPQIIKKG
Residue N579 of SEQ ID NO: 2021, which is underlined and in
bold, may be mutated (e.g., to a A579) to yield a SaCas9
nickase.
Exemplary SaCas9d sequence
(SEQ ID NO: 2022)
KRNYILGLAIGITSVGYGIIDYETRDVIDAGVRLFKEANVENNEGRRSKRGARRLKRRRR
HRIQRVKKLLFDYNLLTDHSELSGINPYEARVKGLSQKLSEEEFSAALLHLAKRRGVHN
VNEVEEDTGNELSTKEQISRNSKALEEKYVAELQLERLKKDGEVRGSINRFKTSDYVKE
AKQLLKVQKAYHQLDQSFIDTYIDLLETRRTYYEGPGEGSPFGWKDIKEWYEMLMGHC
TYFPEELRSVKYAYNADLYNALNDLNNLVITRDENEKLEYYEKFQIIENVFKQKKKPTL
KQIAKEILVNEEDIKGYRVTSTGKPEFTNLKVYHDIKDITARKEIIENAELLDQIAKILTIY
QSSEDIQEELTNLNSELTQEEIEQISNLKGYTGTHNLSLKAINLILDELWHTNDNQIAIFNR
LKLVPKKVDLSQQKEIPTTLVDDFILSPVVKRSFIQSIKVINAIIKKYGLPNDIIIELAREKN
SKDAQKMINEMQKRNRQTNERIEEIIRTTGKENAKYLIEKIKLHDMQEGKCLYSLEAIPL
EDLLNNPFNYEVDHIIPRSVSFDNSFNNKVLVKQEENSKKGNRTPFQYLSSSDSKISYETF
KKHILNLAKGKGRISKTKKEYLLEERDINRFSVQKDFINRNLVDTRYATRGLMNLLRSYF
RVNNLDVKVKSINGGFTSFLRRKWKFKKERNKGYKHHAEDALIIANADFIFKEWKKLD
KAKKVMENQMFEEKQAESMPEIETEQEYKEIFITPHQIKHIKDFKDYKYSHRVDKKPNR
ELINDTLYSTRKDDKGNTLIVNNLNGLYDKDNDKLKKLINKSPEKLLMYHHDPQTYQK
LKLIMEQYGDEKNPLYKYYEETGNYLTKYSKKDNGPVIKKIKYYGNKLNAHLDITDDY
PNSRNKVVKLSLKPYRFDVYLDNGVYKFVTVKNLDVIKKENYYEVNSKCYEEAKKLK
KISNQAEFIASFYNNDLIKINGELYRVIGVNNDLLNRIEVNMIDITYREYLENMNDKRPPR
IIKTIASKTQSIKKYSTDILGNLYEVKSKKHPQIIKKG
Residue A10 of SEQ ID NO: 2022, which can be mutated from
D10 of SEQ ID NO: E1 to yield a nuclease inactive SaCas9d,
is underlined and in bold.
Exemplary SaCas9n sequence
(SEQ ID NO: 2023)
KRNYILGLDIGITSVGYGIIDYETRDVIDAGVRLFKEANVENNEGRRSKRGARRLKRRRR
HRIQRVKKLLFDYNLLTDHSELSGINPYEARVKGLSQKLSEEEFSAALLHLAKRRGVHN
VNEVEEDTGNELSTKEQISRNSKALEEKYVAELQLERLKKDGEVRGSINRFKTSDYVKE
AKQLLKVQKAYHQLDQSFIDTYIDLLETRRTYYEGPGEGSPFGWKDIKEWYEMLMGHC
TYFPEELRSVKYAYNADLYNALNDLNNLVITRDENEKLEYYEKFQIIENVFKQKKKPTL
KQIAKEILVNEEDIKGYRVTSTGKPEFTNLKVYHDIKDITARKEIIENAELLDQIAKILTIY
QSSEDIQEELTNLNSELTQEEIEQISNLKGYTGTHNLSLKAINLILDELWHTNDNQIAIFNR
LKLVPKKVDLSQQKEIPTTLVDDFILSPVVKRSFIQSIKVINAIIKKYGLPNDIIIELAREKN
SKDAQKMINEMQKRNRQTNERIEEIIRTTGKENAKYLIEKIKLHDMQEGKCLYSLEAIPL
EDLLNNPFNYEVDHIIPRSVSFDNSFNNKVLVKQEEASKKGNRTPFQYLSSSDSKISYETF
KKHILNLAKGKGRISKTKKEYLLEERDINRFSVQKDFINRNLVDTRYATRGLMNLLRSYF
RVNNLDVKVKSINGGFTSFLRRKWKFKKERNKGYKHHAEDALIIANADFIFKEWKKLD
KAKKVMENQMFEEKQAESMPEIETEQEYKEIFITPHQIKHIKDFKDYKYSHRVDKKPNR
ELINDTLYSTRKDDKGNTLIVNNLNGLYDKDNDKLKKLINKSPEKLLMYHHDPQTYQK
LKLIMEQYGDEKNPLYKYYEETGNYLTKYSKKDNGPVIKKIKYYGNKLNAHLDITDDY
PNSRNKVVKLSLKPYRFDVYLDNGVYKFVTVKNLDVIKKENYYEVNSKCYEEAKKLK
KISNQAEFIASFYNNDLIKINGELYRVIGVNNDLLNRIEVNMIDITYREYLENMNDKRPPR
IIKTIASKTQSIKKYSTDILGNLYEVKSKKHPQIIKKG
Residue A579 of SEQ ID NO: 2023, which can be mutated from
N579 of SEQ ID NO: 2021 to yield a SaCas9 nickase, is
underlined and in bold.
Exemplary SaKKH Cas9
(SEQ ID NO: 2024)
KRNYILGLDIGITSVGYGIIDYETRDVIDAGVRLFKEANVENNEGRRSKRGARRLKRRRR
HRIQRVKKLLFDYNLLTDHSELSGINPYEARVKGLSQKLSEEEFSAALLHLAKRRGVHN
VNEVEEDTGNELSTKEQISRNSKALEEKYVAELQLERLKKDGEVRGSINRFKTSDYVKE
AKQLLKVQKAYHQLDQSFIDTYIDLLETRRTYYEGPGEGSPFGWKDIKEWYEMLMGHC
TYFPEELRSVKYAYNADLYNALNDLNNLVITRDENEKLEYYEKFQIIENVFKQKKKPTL
KQIAKEILVNEEDIKGYRVTSTGKPEFTNLKVYHDIKDITARKEIIENAELLDQIAKILTIY
QSSEDIQEELTNLNSELTQEEIEQISNLKGYTGTHNLSLKAINLILDELWHTNDNQIAIFNR
LKLVPKKVDLSQQKEIPTTLVDDFILSPVVKRSFIQSIKVINAIIKKYGLPNDIIIELAREKN
SKDAQKMINEMQKRNRQTNERIEEIIRTTGKENAKYLIEKIKLHDMQEGKCLYSLEAIPL
EDLLNNPFNYEVDHIIPRSVSFDNSFNNKVLVKQEEASKKGNRTPFQYLSSSDSKISYETF
KKHILNLAKGKGRISKTKKEYLLEERDINRFSVQKDFINRNLVDTRYATRGLMNLLRSYF
RVNNLDVKVKSINGGFTSFLRRKWKFKKERNKGYKHHAEDALIIANADFIFKEWKKLD
KAKKVMENQMFEEKQAESMPEIETEQEYKEIFITPHQIKHIKDFKDYKYSHRVDKKPNR
KLINDTLYSTRKDDKGNTLIVNNLNGLYDKDNDKLKKLINKSPEKLLMYHHDPQTYQK
LKLIMEQYGDEKNPLYKYYEETGNYLTKYSKKDNGPVIKKIKYYGNKLNAHLDITDDY
PNSRNKVVKLSLKPYRFDVYLDNGVYKFVTVKNLDVIKKENYYEVNSKCYEEAKKLK
KISNQAEFIASFYKNDLIKINGELYRVIGVNNDLLNRIEVNMIDITYREYLENMNDKRPPH
IIKTIASKTQSIKKYSTDILGNLYEVKSKKHPQIIKKG.
Residue A579 of SEQ ID NO: 2024, which can be mutated from
N579 of SEQ ID NO: 2021 to yield a SaCas9 nickase, is
underlined and in bold. Residues K781, K967, and H1014 of SEQ
ID SEQ ID NO: 2024, which can be mutated from E781, N967,
and R1014 of SEQ ID NO: 2021 to yield a SaKKH Cas9
are underlined and initalics.
KKH-nCas9 (D10A/E782K/N968K/R1015H) S. aureus Cas9 Nickase
(SEQ ID NO: 268)
MKRNYILGLAIGITSVGYGIIDYETRDVIDAGVRLFKEANVENNEGRRSKRGARRLKRRR
RHRIQRVKKLLFDYNLLTDHSELSGINPYEARVKGLSQKLSEEEFSAALLHLAKRRGVH
NVNEVEEDTGNELSTKEQISRNSKALEEKYVAELQLERLKKDGEVRGSINRFKTSDYVK
EAKQLLKVQKAYHQLDQSFIDTYIDLLETRRTYYEGPGEGSPFGWKDIKEWYEMLMGH
CTYFPEELRSVKYAYNADLYNALNDLNNLVITRDENEKLEYYEKFQIIENVFKQKKKPT
LKQIAKEILVNEEDIKGYRVTSTGKPEFTNLKVYHDIKDITARKEIIENAELLDQIAKILTIY
QSSEDIQEELTNLNSELTQEEIEQISNLKGYTGTHNLSLKAINLILDELWHTNDNQIAIFNR
LKLVPKKVDLSQQKEIPTTLVDDFILSPVVKRSFIQSIKVINAIIKKYGLPNDIIIELAREKN
SKDAQKMINEMQKRNRQTNERIEEIIRTTGKENAKYLIEKIKLHDMQEGKCLYSLEAIPL
EDLLNNPFNYEVDHIIPRSVSFDNSFNNKVLVKQEENSKKGNRTPFQYLSSSDSKISYETF
KKHILNLAKGKGRISKTKKEYLLEERDINRFSVQKDFINRNLVDTRYATRGLMNLLRSYF
RVNNLDVKVKSINGGFTSFLRRKWKFKKERNKGYKHHAEDALIIANADFIFKEWKKLD
KAKKVMENQMFEEKQAESMPEIETEQEYKEIFITPHQIKHIKDFKDYKYSHRVDKKPNR
KLINDTLYSTRKDDKGNTLIVNNLNGLYDKDNDKLKKLINKSPEKLLMYHHDPQTYQK
LKLIMEQYGDEKNPLYKYYEETGNYLTKYSKKDNGPVIKKIKYYGNKLNAHLDITDDY
PNSRNKVVKLSLKPYRFDVYLDNGVYKFVTVKNLDVIKKENYYEVNSKCYEEAKKLK
KISNQAEFIASFYKNDLIKINGELYRVIGVNNDLLNRIEVNMIDITYREYLENMNDKRPPH
IIKTIASKTQSIKKYSTDILGNLYEVKSKKHPQIIKKG

[0183] In some embodiments, the Cas9 domain is a Cas9 domain from Streptococcus pyogenes (SpCas9). In some embodiments, the SpCas9 domain is a nuclease active SpCas9, a nuclease inactive SpCas9 (SpCas9d), or a SpCas9 nickase (SpCas9n). In some embodiments, the SpCas9 comprises the amino acid sequence SEQ ID NO: 2025. In some embodiments, the SpCas9 comprises a D9X mutation of SEQ ID NO: 2025, or a corresponding mutation in any of the Cas9 amino acid sequences provided herein, including but not limited to SEQ ID NOs: 1-260, 2004, or 2006, wherein X is any amino acid except for D. In some embodiments, the SpCas9 comprises a D9A mutation of SEQ ID NO: 2025, or a corresponding mutation in any of the Cas9 amino acid sequences provided herein, including but not limited to SEQ ID NOs: 1-260, 2004, or 2006. In some embodiments, the SpCas9 domain, the SpCas9d domain, or the SpCas9n domain can bind to a nucleic acid sequence having a non-canonical PAM. In some embodiments, the SpCas9 domain, the SpCas9d domain, or the SpCas9n domain can bind to a nucleic acid sequence having a NGG, a NGA, or a NGCG PAM sequence. In some embodiments, the SpCas9 domain comprises one or more of a D1134X, a R1334X, and a T1336X mutation of SEQ ID NO: 2025, or a corresponding mutation in any of the Cas9 amino acid sequences provided herein, including but not limited to SEQ ID NOs: 1-260, 2004, or 2006, wherein X is any amino acid. In some embodiments, the SpCas9 domain comprises one or more of a D1134E, R1334Q, and T1336R mutation of SEQ ID NO: 2025, or a corresponding mutation in any of the Cas9 amino acid sequences provided herein, including but not limited to SEQ ID NOs: 1-260, 2004, or 2006. In some embodiments, the SpCas9 domain comprises a D1134E, a R1334Q, and a T1336R mutation of SEQ ID NO: 2025, or a corresponding mutation in any of the Cas9 amino acid sequences provided herein, including but not limited to SEQ ID NOs: 1-260, 2004, or 2006. In some embodiments, the SpCas9 domain comprises one or more of a D1134X, a R1334X, and a T1336X mutation of SEQ ID NO: 2025, or a corresponding mutation in any of the Cas9 amino acid sequences provided herein, including but not limited to SEQ ID NOs: 1-260, 2004, or 2006, wherein X is any amino acid. In some embodiments, the SpCas9 domain comprises one or more of a D1134V, a R1334Q, and a T1336R mutation of SEQ ID NO: 2025, or a corresponding mutation in any of the Cas9 amino acid sequences provided herein, including but not limited to SEQ ID NOs: 1-260, 2004, or 2006. In some embodiments, the SpCas9 domain comprises a D1134V, a R1334Q, and a T1336R mutation of SEQ ID NO: 2025, or a corresponding mutation in any of the Cas9 amino acid sequences provided herein, including but not limited to SEQ ID NOs: 1-260, 2004, or 2006. In some embodiments, the SpCas9 domain comprises one or more of a D1134X, a G1217X, a R1334X, and a T1336X mutation of SEQ ID NO: 2025, or a corresponding mutation in any of the Cas9 amino acid sequences provided herein, including but not limited to SEQ ID NOs: 1-260, 2004, or 2006, wherein X is any amino acid. In some embodiments, the SpCas9 domain comprises one or more of a D1134V, a G1217R, a R1334Q, and a T1336R mutation of SEQ ID NO: 2025, or a corresponding mutation in any of the Cas9 amino acid sequences provided herein, including but not limited to SEQ ID NOs: 1-260, 2004, or 2006. In some embodiments, the SpCas9 domain comprises a D1134V, a G1217R, a R1334Q, and a T1336R mutation of SEQ ID NO: 2025, or a corresponding mutation in any of the Cas9 amino acid sequences provided herein, including but not limited to SEQ ID NOs: 1-260, 2004, or 2006.

[0184] In some embodiments, the Cas9 domain of any of the fusion proteins provided herein comprises an amino acid sequence that is at least 60%, at least 65%, at least 70%, at least 75%, at least 80%, at least 85%, at least 90%, at least 95%, at least 96%, at least 97%, at least 98%, at least 99%, or at least 99.5% identical to any one of SEQ ID NOs: 2025-2029 or 2000-2002. In some embodiments, the Cas9 domain of any of the fusion proteins provided herein comprises the amino acid sequence of any one of SEQ ID NOs: 2025-2029 or 2000-2002. In some embodiments, the Cas9 domain of any of the fusion proteins provided herein consists of the amino acid sequence of any one of SEQ ID NOs: 2025-2029 or 2000-2002.

Exemplary SpCas9
(SEQ ID NO: 2025)
DKKYSIGLDIGTNSVGWAVITDEYKVPSKKFKVLGNTDRHSIKKNLIGALLFDSGETAEA
TRLKRTARRRYTRRKNRICYLQEIFSNEMAKVDDSFFHRLEESFLVEEDKKHERHPIFGN
IVDEVAYHEKYPTIYHLRKKLVDSTDKADLRLIYLALAHMIKFRGHFLIEGDLNPDNSDV
DKLFIQLVQTYNQLFEENPINASGVDAKAILSARLSKSRRLENLIAQLPGEKKNGLFGNLI
ALSLGLTPNFKSNFDLAEDAKLQLSKDTYDDDLDNLLAQIGDQYADLFLAAKNLSDAIL
LSDILRVNTEITKAPLSASMIKRYDEHHQDLTLLKALVRQQLPEKYKEIFFDQSKNGYAG
YIDGGASQEEFYKFIKPILEKMDGTEELLVKLNREDLLRKQRTFDNGSIPHQIHLGELHAI
LRRQEDFYPFLKDNREKIEKILTFRIPYYVGPLARGNSRFAWMTRKSEETITPWNFEEVV
DKGASAQSFIERMTNFDKNLPNEKVLPKHSLLYEYFTVYNELTKVKYVTEGMRKPAFLS
GEQKKAIVDLLFKTNRKVTVKQLKEDYFKKIECFDSVEISGVEDRFNASLGTYHDLLKII
KDKDFLDNEENEDILEDIVLTLTLFEDREMIEERLKTYAHLFDDKVMKQLKRRRYTGWG
RLSRKLINGIRDKQSGKTILDFLKSDGFANRNFMQLIHDDSLTFKEDIQKAQVSGQGDSL
HEHIANLAGSPAIKKGILQTVKVVDELVKVMGRHKPENIVIEMARENQTTQKGQKNSRE
RMKRIEEGIKELGSQILKEHPVENTQLQNEKLYLYYLQNGRDMYVDQELDINRLSDYDV
DHIVPQSFLKDDSIDNKVLTRSDKNRGKSDNVPSEEVVKKMKNYWRQLLNAKLITQRK
FDNLTKAERGGLSELDKAGFIKRQLVETRQITKHVAQILDSRMNTKYDENDKLIREVKVI
TLKSKLVSDFRKDFQFYKVREINNYHHAHDAYLNAVVGTALIKKYPKLESEFVYGDYK
VYDVRKMIAKSEQEIGKATAKYFFYSNIMNFFKTEITLANGEIRKRPLIETNGETGEIVWD
KGRDFATVRKVLSMPQVNIVKKTEVQTGGFSKESILPKRNSDKLIARKKDWDPKKYGG
FDSPTVAYSVLVVAKVEKGKSKKLKSVKELLGITIMERSSFEKNPIDFLEAKGYKEVKK
DLIIKLPKYSLFELENGRKRMLASAGELQKGNELALPSKYVNFLYLASHYEKLKGSPED
NEQKQLFVEQHKHYLDEIIEQISEFSKRVILADANLDKVLSAYNKHRDKPIREQAENIIHL
FTLTNLGAPAAFKYFDTTIDRKRYTSTKEVLDATLIHQSITGLYETRIDLSQLGGD
Exemplary SpCas9n
(SEQ ID NO: 2026)
DKKYSIGLAIGTNSVGWAVITDEYKVPSKKFKVLGNTDRHSIKKNLIGALLFDSGETAEA
TRLKRTARRRYTRRKNRICYLQEIFSNEMAKVDDSFFHRLEESFLVEEDKKHERHPIFGN
IVDEVAYHEKYPTIYHLRKKLVDSTDKADLRLIYLALAHMIKFRGHFLIEGDLNPDNSDV
DKLFIQLVQTYNQLFEENPINASGVDAKAILSARLSKSRRLENLIAQLPGEKKNGLFGNLI
ALSLGLTPNFKSNFDLAEDAKLQLSKDTYDDDLDNLLAQIGDQYADLFLAAKNLSDAIL
LSDILRVNTEITKAPLSASMIKRYDEHHQDLTLLKALVRQQLPEKYKEIFFDQSKNGYAG
YIDGGASQEEFYKFIKPILEKMDGTEELLVKLNREDLLRKQRTFDNGSIPHQIHLGELHAI
LRRQEDFYPFLKDNREKIEKILTFRIPYYVGPLARGNSRFAWMTRKSEETITPWNFEEVV
DKGASAQSFIERMTNFDKNLPNEKVLPKHSLLYEYFTVYNELTKVKYVTEGMRKPAFLS
GEQKKAIVDLLFKTNRKVTVKQLKEDYFKKIECFDSVEISGVEDRFNASLGTYHDLLKII
KDKDFLDNEENEDILEDIVLTLTLFEDREMIEERLKTYAHLFDDKVMKQLKRRRYTGWG
RLSRKLINGIRDKQSGKTILDFLKSDGFANRNFMQLIHDDSLTFKEDIQKAQVSGQGDSL
HEHIANLAGSPAIKKGILQTVKVVDELVKVMGRHKPENIVIEMARENQTTQKGQKNSRE
RMKRIEEGIKELGSQILKEHPVENTQLQNEKLYLYYLQNGRDMYVDQELDINRLSDYDV
DHIVPQSFLKDDSIDNKVLTRSDKNRGKSDNVPSEEVVKKMKNYWRQLLNAKLITQRK
FDNLTKAERGGLSELDKAGFIKRQLVETRQITKHVAQILDSRMNTKYDENDKLIREVKVI
TLKSKLVSDFRKDFQFYKVREINNYHHAHDAYLNAVVGTALIKKYPKLESEFVYGDYK
VYDVRKMIAKSEQEIGKATAKYFFYSNIMNFFKTEITLANGEIRKRPLIETNGETGEIVWD
KGRDFATVRKVLSMPQVNIVKKTEVQTGGFSKESILPKRNSDKLIARKKDWDPKKYGG
FDSPTVAYSVLVVAKVEKGKSKKLKSVKELLGITIMERSSFEKNPIDFLEAKGYKEVKK
DLIIKLPKYSLFELENGRKRMLASAGELQKGNELALPSKYVNFLYLASHYEKLKGSPED
NEQKQLFVEQHKHYLDEIIEQISEFSKRVILADANLDKVLSAYNKHRDKPIREQAENIIHL
FTLTNLGAPAAFKYFDTTIDRKRYTSTKEVLDATLIHQSITGLYETRIDLSQLGGD
VRER-Cas9 (D1135V/G1218R/R1335E/T1337R) S. pyogenes Cas9
(SEQ ID NO: 2027)
MDKKYSIGLDIGTNSVGWAVITDEYKVPSKKFKVLGNTDRHSIKKNLIGALLFDSGETA
EATRLKRTARRRYTRRKNRICYLQEIFSNEMAKVDDSFFHRLEESFLVEEDKKHERHPIF
GNIVDEVAYHEKYPTIYHLRKKLVDSTDKADLRLIYLALAHMIKFRGHFLIEGDLNPDNS
DVDKLFIQLVQTYNQLFEENPINASGVDAKAILSARLSKSRRLENLIAQLPGEKKNGLFG
NLIALSLGLTPNFKSNFDLAEDAKLQLSKDTYDDDLDNLLAQIGDQYADLFLAAKNLSD
AILLSDILRVNTEITKAPLSASMIKRYDEHHQDLTLLKALVRQQLPEKYKEIFFDQSKNGY
AGYIDGGASQEEFYKFIKPILEKMDGTEELLVKLNREDLLRKQRTFDNGSIPHQIHLGEL
HAILRRQEDFYPFLKDNREKIEKILTFRIPYYVGPLARGNSRFAWMTRKSEETITPWNFEE
VVDKGASAQSFIERMTNFDKNLPNEKVLPKHSLLYEYFTVYNELTKVKYVTEGMRKPA
FLSGEQKKAIVDLLFKTNRKVTVKQLKEDYFKKIECFDSVEISGVEDRFNASLGTYHDLL
KIIKDKDFLDNEENEDILEDIVLTLTLFEDREMIEERLKTYAHLFDDKVMKQLKRRRYTG
WGRLSRKLINGIRDKQSGKTILDFLKSDGFANRNFMQLIHDDSLTFKEDIQKAQVSGQG
DSLHEHIANLAGSPAIKKGILQTVKVVDELVKVMGRHKPENIVIEMARENQTTQKGQKN
SRERMKRIEEGIKELGSQILKEHPVENTQLQNEKLYLYYLQNGRDMYVDQELDINRLSD
YDVDHIVPQSFLKDDSIDNKVLTRSDKNRGKSDNVPSEEVVKKMKNYWRQLLNAKLIT
QRKFDNLTKAERGGLSELDKAGFIKRQLVETRQITKHVAQILDSRMNTKYDENDKLIRE
VKVITLKSKLVSDFRKDFQFYKVREINNYHHAHDAYLNAVVGTALIKKYPKLESEFVYG
DYKVYDVRKMIAKSEQEIGKATAKYFFYSNIMNFFKTEITLANGEIRKRPLIETNGETGEI
VWDKGRDFATVRKVLSMPQVNIVKKTEVQTGGFSKESILPKRNSDKLIARKKDWDPKK
YGGFVSPTVAYSVLVVAKVEKGKSKKLKSVKELLGITIMERSSFEKNPIDFLEAKGYKE
VKKDLIIKLPKYSLFELENGRKRMLASARELQKGNELALPSKYVNFLYLASHYEKLKGS
PEDNEQKQLFVEQHKHYLDEIIEQISEFSKRVILADANLDKVLSAYNKHRDKPIREQAENI
IHLFTLTNLGAPAAFKYFDTTIDRKEYRSTKEVLDATLIHQSITGLYETRIDLSQLGGD
(single underline: HNH domain; double underline: RuvC domain)
VRER-nCas9 (D10A/D1135V/G1218R/R1335E/T1337R)
S. pyogenes Cas9 Nickase
(SEQ ID NO: 2000)
MDKKYSIGLAIGTNSVGWAVITDEYKVPSKKFKVLGNTDRHSIKKNLIGALLFDSGETA
EATRLKRTARRRYTRRKNRICYLQEIFSNEMAKVDDSFFHRLEESFLVEEDKKHERHPIF
GNIVDEVAYHEKYPTIYHLRKKLVDSTDKADLRLIYLALAHMIKFRGHFLIEGDLNPDNS
DVDKLFIQLVQTYNQLFEENPINASGVDAKAILSARLSKSRRLENLIAQLPGEKKNGLFG
NLIALSLGLTPNFKSNFDLAEDAKLQLSKDTYDDDLDNLLAQIGDQYADLFLAAKNLSD
AILLSDILRVNTEITKAPLSASMIKRYDEHHQDLTLLKALVRQQLPEKYKEIFFDQSKNGY
AGYIDGGASQEEFYKFIKPILEKMDGTEELLVKLNREDLLRKQRTFDNGSIPHQIHLGEL
HAILRRQEDFYPFLKDNREKIEKILTFRIPYYVGPLARGNSRFAWMTRKSEETITPWNFEE
VVDKGASAQSFIERMTNFDKNLPNEKVLPKHSLLYEYFTVYNELTKVKYVTEGMRKPA
FLSGEQKKAIVDLLFKTNRKVTVKQLKEDYFKKIECFDSVEISGVEDRFNASLGTYHDLL
KIIKDKDFLDNEENEDILEDIVLTLTLFEDREMIEERLKTYAHLFDDKVMKQLKRRRYTG
WGRLSRKLINGIRDKQSGKTILDFLKSDGFANRNFMQLIHDDSLTFKEDIQKAQVSGQG
DSLHEHIANLAGSPAIKKGILQTVKVVDELVKVMGRHKPENIVIEMARENQTTQKGQKN
SRERMKRIEEGIKELGSQILKEHPVENTQLQNEKLYLYYLQNGRDMYVDQELDINRLSD
YDVDHIVPQSFLKDDSIDNKVLTRSDKNRGKSDNVPSEEVVKKMKNYWRQLLNAKLIT
QRKFDNLTKAERGGLSELDKAGFIKRQLVETRQITKHVAQILDSRMNTKYDENDKLIRE
VKVITLKSKLVSDFRKDFQFYKVREINNYHHAHDAYLNAVVGTALIKKYPKLESEFVYG
DYKVYDVRKMIAKSEQEIGKATAKYFFYSNIMNFFKTEITLANGEIRKRPLIETNGETGEI
VWDKGRDFATVRKVLSMPQVNIVKKTEVQTGGFSKESILPKRNSDKLIARKKDWDPKK
YGGFVSPTVAYSVLVVAKVEKGKSKKLKSVKELLGITIMERSSFEKNPIDFLEAKGYKE
VKKDLIIKLPKYSLFELENGRKRMLASARELQKGNELALPSKYVNFLYLASHYEKLKGS
PEDNEQKQLFVEQHKHYLDEIIEQISEFSKRVILADANLDKVLSAYNKHRDKPIREQAENI
IHLFTLTNLGAPAAFKYFDTTIDRKEYRSTKEVLDATLIHQSITGLYETRIDLSQLGGD
(single underline: HNH domain; double underline: RuvC domain)
VQR-Cas9 (D1135V/R1335Q/T1337R) S. pyogenes Cas9
(SEQ ID NO: 2028)
MDKKYSIGLDIGTNSVGWAVITDEYKVPSKKFKVLGNTDRHSIKKNLIGALLFDSGETA
EATRLKRTARRRYTRRKNRICYLQEIFSNEMAKVDDSFFHRLEESFLVEEDKKHERHPIF
GNIVDEVAYHEKYPTIYHLRKKLVDSTDKADLRLIYLALAHMIKFRGHFLIEGDLNPDNS
DVDKLFIQLVQTYNQLFEENPINASGVDAKAILSARLSKSRRLENLIAQLPGEKKNGLFG
NLIALSLGLTPNFKSNFDLAEDAKLQLSKDTYDDDLDNLLAQIGDQYADLFLAAKNLSD
AILLSDILRVNTEITKAPLSASMIKRYDEHHQDLTLLKALVRQQLPEKYKEIFFDQSKNGY
AGYIDGGASQEEFYKFIKPILEKMDGTEELLVKLNREDLLRKQRTFDNGSIPHQIHLGEL
HAILRRQEDFYPFLKDNREKIEKILTFRIPYYVGPLARGNSRFAWMTRKSEETITPWNFEE
VVDKGASAQSFIERMTNFDKNLPNEKVLPKHSLLYEYFTVYNELTKVKYVTEGMRKPA
FLSGEQKKAIVDLLFKTNRKVTVKQLKEDYFKKIECFDSVEISGVEDRFNASLGTYHDLL
KIIKDKDFLDNEENEDILEDIVLTLTLFEDREMIEERLKTYAHLFDDKVMKQLKRRRYTG
WGRLSRKLINGIRDKQSGKTILDFLKSDGFANRNFMQLIHDDSLTFKEDIQKAQVSGQG
DSLHEHIANLAGSPAIKKGILQTVKVVDELVKVMGRHKPENIVIEMARENQTTQKGQKN
SRERMKRIEEGIKELGSQILKEHPVENTQLQNEKLYLYYLQNGRDMYVDQELDINRLSD
YDVDHIVPQSFLKDDSIDNKVLTRSDKNRGKSDNVPSEEVVKKMKNYWRQLLNAKLIT
QRKFDNLTKAERGGLSELDKAGFIKRQLVETRQITKHVAQILDSRMNTKYDENDKLIRE
VKVITLKSKLVSDFRKDFQFYKVREINNYHHAHDAYLNAVVGTALIKKYPKLESEFVYG
DYKVYDVRKMIAKSEQEIGKATAKYFFYSNIMNFFKTEITLANGEIRKRPLIETNGETGEI
VWDKGRDFATVRKVLSMPQVNIVKKTEVQTGGFSKESILPKRNSDKLIARKKDWDPKK
YGGFVSPTVAYSVLVVAKVEKGKSKKLKSVKELLGITIMERSSFEKNPIDFLEAKGYKE
VKKDLIIKLPKYSLFELENGRKRMLASAGELQKGNELALPSKYVNFLYLASHYEKLKGS
PEDNEQKQLFVEQHKHYLDEIIEQISEFSKRVILADANLDKVLSAYNKHRDKPIREQAENI
IHLFTLTNLGAPAAFKYFDTTIDRKQYRSTKEVLDATLIHQSITGLYETRIDLSQLGGD
(single underline: HNH domain; double underline: RuvC domain)
VQR-nCas9 (D10A/D1135V/R1335Q/T1337R) S. pyogenes
Cas9 Nickase
(SEQ ID NO: 2001)
MDKKYSIGLAIGTNSVGWAVITDEYKVPSKKFKVLGNTDRHSIKKNLIGALLFDSGETA
EATRLKRTARRRYTRRKNRICYLQEIFSNEMAKVDDSFFHRLEESFLVEEDKKHERHPIF
GNIVDEVAYHEKYPTIYHLRKKLVDSTDKADLRLIYLALAHMIKFRGHFLIEGDLNPDNS
DVDKLFIQLVQTYNQLFEENPINASGVDAKAILSARLSKSRRLENLIAQLPGEKKNGLFG
NLIALSLGLTPNFKSNFDLAEDAKLQLSKDTYDDDLDNLLAQIGDQYADLFLAAKNLSD
AILLSDILRVNTEITKAPLSASMIKRYDEHHQDLTLLKALVRQQLPEKYKEIFFDQSKNGY
AGYIDGGASQEEFYKFIKPILEKMDGTEELLVKLNREDLLRKQRTFDNGSIPHQIHLGEL
HAILRRQEDFYPFLKDNREKIEKILTFRIPYYVGPLARGNSRFAWMTRKSEETITPWNFEE
VVDKGASAQSFIERMTNFDKNLPNEKVLPKHSLLYEYFTVYNELTKVKYVTEGMRKPA
FLSGEQKKAIVDLLFKTNRKVTVKQLKEDYFKKIECFDSVEISGVEDRFNASLGTYHDLL
KIIKDKDFLDNEENEDILEDIVLTLTLFEDREMIEERLKTYAHLFDDKVMKQLKRRRYTG
WGRLSRKLINGIRDKQSGKTILDFLKSDGFANRNFMQLIHDDSLTFKEDIQKAQVSGQG
DSLHEHIANLAGSPAIKKGILQTVKVVDELVKVMGRHKPENIVIEMARENQTTQKGQKN
SRERMKRIEEGIKELGSQILKEHPVENTQLQNEKLYLYYLQNGRDMYVDQELDINRLSD
YDVDHIVPQSFLKDDSIDNKVLTRSDKNRGKSDNVPSEEVVKKMKNYWRQLLNAKLIT
QRKFDNLTKAERGGLSELDKAGFIKRQLVETRQITKHVAQILDSRMNTKYDENDKLIRE
VKVITLKSKLVSDFRKDFQFYKVREINNYHHAHDAYLNAVVGTALIKKYPKLESEFVYG
DYKVYDVRKMIAKSEQEIGKATAKYFFYSNIMNFFKTEITLANGEIRKRPLIETNGETGEI
VWDKGRDFATVRKVLSMPQVNIVKKTEVQTGGFSKESILPKRNSDKLIARKKDWDPKK
YGGFVSPTVAYSVLVVAKVEKGKSKKLKSVKELLGITIMERSSFEKNPIDFLEAKGYKE
VKKDLIIKLPKYSLFELENGRKRMLASAGELQKGNELALPSKYVNFLYLASHYEKLKGS
PEDNEQKQLFVEQHKHYLDEIIEQISEFSKRVILADANLDKVLSAYNKHRDKPIREQAENI
IHLFTLTNLGAPAAFKYFDTTIDRKQYRSTKEVLDATLIHQSITGLYETRIDLSQLGGD
(single underline: HNH domain; double underline: RuvC domain)
EQR-Cas9 (D1135E/R1335Q/T1337R) S. pyogenes Cas9
(SEQ ID NO: 2029)
MDKKYSIGLDIGTNSVGWAVITDEYKVPSKKFKVLGNTDRHSIKKNLIGALLFDSGETA
EATRLKRTARRRYTRRKNRICYLQEIFSNEMAKVDDSFFHRLEESFLVEEDKKHERHPIF
GNIVDEVAYHEKYPTIYHLRKKLVDSTDKADLRLIYLALAHMIKFRGHFLIEGDLNPDNS
DVDKLFIQLVQTYNQLFEENPINASGVDAKAILSARLSKSRRLENLIAQLPGEKKNGLFG
NLIALSLGLTPNFKSNFDLAEDAKLQLSKDTYDDDLDNLLAQIGDQYADLFLAAKNLSD
AILLSDILRVNTEITKAPLSASMIKRYDEHHQDLTLLKALVRQQLPEKYKEIFFDQSKNGY
AGYIDGGASQEEFYKFIKPILEKMDGTEELLVKLNREDLLRKQRTFDNGSIPHQIHLGEL
HAILRRQEDFYPFLKDNREKIEKILTFRIPYYVGPLARGNSRFAWMTRKSEETITPWNFEE
VVDKGASAQSFIERMTNFDKNLPNEKVLPKHSLLYEYFTVYNELTKVKYVTEGMRKPA
FLSGEQKKAIVDLLFKTNRKVTVKQLKEDYFKKIECFDSVEISGVEDRFNASLGTYHDLL
KIIKDKDFLDNEENEDILEDIVLTLTLFEDREMIEERLKTYAHLFDDKVMKQLKRRRYTG
WGRLSRKLINGIRDKQSGKTILDFLKSDGFANRNFMQLIHDDSLTFKEDIQKAQVSGQG
DSLHEHIANLAGSPAIKKGILQTVKVVDELVKVMGRHKPENIVIEMARENQTTQKGQKN
SRERMKRIEEGIKELGSQILKEHPVENTQLQNEKLYLYYLQNGRDMYVDQELDINRLSD
YDVDHIVPQSFLKDDSIDNKVLTRSDKNRGKSDNVPSEEVVKKMKNYWRQLLNAKLIT
QRKFDNLTKAERGGLSELDKAGFIKRQLVETRQITKHVAQILDSRMNTKYDENDKLIRE
VKVITLKSKLVSDFRKDFQFYKVREINNYHHAHDAYLNAVVGTALIKKYPKLESEFVYG
DYKVYDVRKMIAKSEQEIGKATAKYFFYSNIMNFFKTEITLANGEIRKRPLIETNGETGEI
VWDKGRDFATVRKVLSMPQVNIVKKTEVQTGGFSKESILPKRNSDKLIARKKDWDPKK
YGGFESPTVAYSVLVVAKVEKGKSKKLKSVKELLGITIMERSSFEKNPIDFLEAKGYKEV
KKDLIIKLPKYSLFELENGRKRMLASAGELQKGNELALPSKYVNFLYLASHYEKLKGSP
EDNEQKQLFVEQHKHYLDEIIEQISEFSKRVILADANLDKVLSAYNKHRDKPIREQAENII
HLFTLTNLGAPAAFKYFDTTIDRKQYRSTKEVLDATLIHQSITGLYETRIDLSQLGGD
(single underline: HNH domain; double underline: RuvC domain)
EQR-nCas9 (D10A/D1135E/R1335Q/T1337R) S. pyogenes
Cas9 Nickase
(SEQ ID NO: 2002)
MDKKYSIGLAIGTNSVGWAVITDEYKVPSKKFKVLGNTDRHSIKKNLIGALLFDSGETA
EATRLKRTARRRYTRRKNRICYLQEIFSNEMAKVDDSFFHRLEESFLVEEDKKHERHPIF
GNIVDEVAYHEKYPTIYHLRKKLVDSTDKADLRLIYLALAHMIKFRGHFLIEGDLNPDNS
DVDKLFIQLVQTYNQLFEENPINASGVDAKAILSARLSKSRRLENLIAQLPGEKKNGLFG
NLIALSLGLTPNFKSNFDLAEDAKLQLSKDTYDDDLDNLLAQIGDQYADLFLAAKNLSD
AILLSDILRVNTEITKAPLSASMIKRYDEHHQDLTLLKALVRQQLPEKYKEIFFDQSKNGY
AGYIDGGASQEEFYKFIKPILEKMDGTEELLVKLNREDLLRKQRTFDNGSIPHQIHLGEL
HAILRRQEDFYPFLKDNREKIEKILTFRIPYYVGPLARGNSRFAWMTRKSEETITPWNFEE
VVDKGASAQSFIERMTNFDKNLPNEKVLPKHSLLYEYFTVYNELTKVKYVTEGMRKPA
FLSGEQKKAIVDLLFKTNRKVTVKQLKEDYFKKIECFDSVEISGVEDRFNASLGTYHDLL
KIIKDKDFLDNEENEDILEDIVLTLTLFEDREMIEERLKTYAHLFDDKVMKQLKRRRYTG
WGRLSRKLINGIRDKQSGKTILDFLKSDGFANRNFMQLIHDDSLTFKEDIQKAQVSGQG
DSLHEHIANLAGSPAIKKGILQTVKVVDELVKVMGRHKPENIVIEMARENQTTQKGQKN
SRERMKRIEEGIKELGSQILKEHPVENTQLQNEKLYLYYLQNGRDMYVDQELDINRLSD
YDVDHIVPQSFLKDDSIDNKVLTRSDKNRGKSDNVPSEEVVKKMKNYWRQLLNAKLIT
QRKFDNLTKAERGGLSELDKAGFIKRQLVETRQITKHVAQILDSRMNTKYDENDKLIRE
VKVITLKSKLVSDFRKDFQFYKVREINNYHHAHDAYLNAVVGTALIKKYPKLESEFVYG
DYKVYDVRKMIAKSEQEIGKATAKYFFYSNIMNFFKTEITLANGEIRKRPLIETNGETGEI
VWDKGRDFATVRKVLSMPQVNIVKKTEVQTGGFSKESILPKRNSDKLIARKKDWDPKK
YGGFESPTVAYSVLVVAKVEKGKSKKLKSVKELLGITIMERSSFEKNPIDFLEAKGYKEV
KKDLIIKLPKYSLFELENGRKRMLASAGELQKGNELALPSKYVNFLYLASHYEKLKGSP
EDNEQKQLFVEQHKHYLDEIIEQISEFSKRVILADANLDKVLSAYNKHRDKPIREQAENII
HLFTLTNLGAPAAFKYFDTTIDRKQYRSTKEVLDATLIHQSITGLYETRIDLSQLGGD
(single underline: HNH domain; double underline: RuvC domain)

[0185] Other on-limiting, exemplary Cas9 variants (including dCas9, Cas9 nickase, and Cas9 variants with alternative PAM requirements) suitable for use in the nucleobase editors described herein and their respective sequence are provided below.

Streptococcus thermophilus CRISPR1 Cas9 (St1Cas9)
Nickase (D9A)
(SEQ ID NO: 269)
MSDLVLGLAIGIGSVGVGILNKVTGEIIHKNSRIFPAAQAENNLVRRTNRQGRRLTRRKK
HRRVRLNRLFEESGLITDFTKISINLNPYQLRVKGLTDELSNEELFIALKNMVKHRGISYL
DDASDDGNSSIGDYAQIVKENSKQLETKTPGQIQLERYQTYGQLRGDFTVEKDGKKHRL
INVFPTSAYRSEALRILQTQQEFNPQITDEFINRYLEILTGKRKYYHGPGNEKSRTDYGRY
RTSGETLDNIFGILIGKCTFYPDEFRAAKASYTAQEFNLLNDLNNLTVPTETKKLSKEQK
NQIINYVKNEKAMGPAKLFKYIAKLLSCDVADIKGYRIDKSGKAEIHTFEAYRKMKTLE
TLDIEQMDRETLDKLAYVLTLNTEREGIQEALEHEFADGSFSQKQVDELVQFRKANSSIF
GKGWHNFSVKLMMELIPELYETSEEQMTILTRLGKQKTTSSSNKTKYIDEKLLTEEIYNP
VVAKSVRQAIKIVNAAIKEYGDFDNIVIEMARETNEDDEKKAIQKIQKANKDEKDAAML
KAANQYNGKAELPHSVFHGHKQLATKIRLWHQQGERCLYTGKTISIHDLINNSNQFEVD
HILPLSITFDDSLANKVLVYATANQEKGQRTPYQALDSMDDAWSFRELKAFVRESKTLS
NKKKEYLLTEEDISKFDVRKKFIERNLVDTRYASRVVLNALQEHFRAHKIDTKVSVVRG
QFTSQLRRHWGIEKTRDTYHHHAVDALIIAASSQLNLWKKQKNTLVSYSEDQLLDIETG
ELISDDEYKESVFKAPYQHFVDTLKSKEFEDSILFSYQVDSKFNRKISDATIYATRQAKV
GKDKADETYVLGKIKDIYTQDGYDAFMKIYKKDKSKFLMYRHDPQTFEKVIEPILENYP
NKQINEKGKEVPCNPFLKYKEEHGYIRKYSKKGNGPEIKSLKYYDSKLGNHIDITPKDSN
NKVVLQSVSPWRADVYFNKTTGKYEILGLKYADLQFEKGTGTYKISQEKYNDIKKKEG
VDSDSEFKFTLYKNDLLLVKDTETKEQQLFRFLSRTMPKQKHYVELKPYDKQKFEGGE
ALIKVLGNVANSGQCKKGLGKSNISIYKVRTDVLGNQHIIKNEGDKPKLDF
Streptococcus thermophilus CRISPR3Cas9 (St3Cas9)
Nickase (D10A)
(SEQ ID NO: 1999)
MTKPYSIGLAIGTNSVGWAVITDNYKVPSKKMKVLGNTSKKYIKKNLLGVLLFDSGITA
EGRRLKRTARRRYTRRRNRILYLQEIFSTEMATLDDAFFQRLDDSFLVPDDKRDSKYPIF
GNLVEEKVYHDEFPTIYHLRKYLADSTKKADLRLVYLALAHMIKYRGHFLIEGEFNSKN
NDIQKNFQDFLDTYNAIFESDLSLENSKQLEEIVKDKISKLEKKDRILKLFPGEKNSGIFSE
FLKLIVGNQADFRKCFNLDEKASLHFSKESYDEDLETLLGYIGDDYSDVFLKAKKLYDAI
LLSGFLTVTDNETEAPLSSAMIKRYNEHKEDLALLKEYIRNISLKTYNEVFKDDTKNGYA
GYIDGKTNQEDFYVYLKNLLAEFEGADYFLEKIDREDFLRKQRTFDNGSIPYQIHLQEMR
AILDKQAKFYPFLAKNKERIEKILTFRIPYYVGPLARGNSDFAWSIRKRNEKITPWNFEDV
IDKESSAEAFINRMTSFDLYLPEEKVLPKHSLLYETFNVYNELTKVRFIAESMRDYQFLD
SKQKKDIVRLYFKDKRKVTDKDIIEYLHAIYGYDGIELKGIEKQFNSSLSTYHDLLNIIND
KEFLDDSSNEAIIEEIIHTLTIFEDREMIKQRLSKFENIFDKSVLKKLSRRHYTGWGKLSAK
LINGIRDEKSGNTILDYLIDDGISNRNFMQLIHDDALSFKKKIQKAQIIGDEDKGNIKEVV
KSLPGSPAIKKGILQSIKIVDELVKVMGGRKPESIVVEMARENQYTNQGKSNSQQRLKRL
EKSLKELGSKILKENIPAKLSKIDNNALQNDRLYLYYLQNGKDMYTGDDLDIDRLSNYD
IDHIIPQAFLKDNSIDNKVLVSSASNRGKSDDFPSLEVVKKRKTFWYQLLKSKLISQRKFD
NLTKAERGGLLPEDKAGFIQRQLVETRQITKHVARLLDEKFNNKKDENNRAVRTVKIIT
LKSTLVSQFRKDFELYKVREINDFHHAHDAYLNAVIASALLKKYPKLEPEFVYGDYPKY
NSFRERKSATEKVYFYSNIMNIFKKSISLADGRVIERPLIEVNEETGESVWNKESDLATVR
RVLSYPQVNVVKKVEEQNHGLDRGKPKGLFNANLSSKPKPNSNENLVGAKEYLDPKK
YGGYAGISNSFAVLVKGTIEKGAKKKITNVLEFQGISILDRINYRKDKLNFLLEKGYKDIE
LIIELPKYSLFELSDGSRRMLASILSTNNKRGEIHKGNQIFLSQKFVKLLYHAKRISNTINE
NHRKYVENHKKEFEELFYYILEFNENYVGAKKNGKLLNSAFQSWQNHSIDELCSSFIGP
TGSERKGLFELTSRGSAADFEFLGVKIPRYRDYTPSSLLKDATLIHQSVTGLYETRIDLAK
LGEG

### Deaminase Domains

[0186] In some embodiments, the nucleobase editors useful in the present disclosure comprises: (i) a guide nucleotide sequence-programmable DNA-binding protein domain; and (ii) a deaminase domain. In some embodiments, the deaminase domain of the fusion protein is a cytosine deaminase. In some embodiments, the deaminase is an APOBEC1 deaminase. In some embodiments, the deaminase is a rat APOBEC1. In some embodiments, the deaminase is a human APOBEC1. In some embodiments, the deaminase is an APOBEC2 deaminase. In some embodiments, the deaminase is an APOBEC3A deaminase. In some embodiments, the deaminase is an APOBEC3B deaminase. In some embodiments, the deaminase is an APOBEC3C deaminase. In some embodiments, the deaminase is an APOBEC3D deaminase. In some embodiments, is an APOBEC3F deaminase. In some embodiments, the deaminase is an APOBEC3G deaminase. In some embodiments, the deaminase is an APOBEC3H deaminase. In some embodiments, the deaminase is an APOBEC4 deaminase. In some embodiments, the deaminase is an activation-induced deaminase (AID). In some embodiments, the deaminase is a Lamprey CDA1 (pmCDA1). In some embodiments, the deaminase is a human APOBEC3G or a functional fragment thereof. In some embodiments, the deaminase is an APOBEC3G variant comprising mutations correspond to the D316R/D317R mutations in the human APOBEC3G. Exemplary, non-limiting cytosine deaminase sequences that may be used in accordance with the methods of the present disclosure are provided in Example 1 below.

[0187] In some embodiments, the cytosine deaminase is a wild type deaminase or a deaminase as set forth in SEQ ID NOs: 271-292 and 303. In some embodiments, the cytosine deaminase domains of the fusion proteins provided herein include fragments of deaminases and proteins homologous to a deaminase. For example, in some embodiments, a deaminase domain may comprise a fragment of the amino acid sequence set forth in any of SEQ ID NOs: 271-292 and 303. In some embodiments, a deaminase domain comprises an amino acid sequence homologous to the amino acid sequence set forth in any of SEQ ID NOs: 271-292 and 303 or an amino acid sequence homologous to a fragment of the amino acid sequence set forth in any of SEQ ID NOs: 271-292 and 303. In some embodiments, proteins comprising a deaminase, a fragments of a deaminase, or homologs of a deaminase or a deaminase are referred to as “deaminase variants.” A deaminase variant shares homology to a deaminase, or a fragment thereof. For example a deaminase variant is at least about 70% identical, at least about 80% identical, at least about 90% identical, at least about 95% identical, at least about 96% identical, at least about 97% identical, at least about 98% identical, at least about 99% identical, at least about 99.5% identical, or at least about 99.9% to a wild type deaminase or a deaminase as set forth in any of SEQ ID NOs: 271-292 and 303. In some embodiments, the deaminase variant comprises a fragment of the deaminase, such that the fragment is at least about 70% identical, at least about 80% identical, at least about 90% identical, at least about 95% identical, at least about 96% identical, at least about 97% identical, at least about 98% identical, at least about 99% identical, at least about 99.5% identical, or at least about 99.9% to the corresponding fragment of wild type deaminase or a deaminase as set forth in any of SEQ ID NOs: 271-292 and 303. In some embodiments, the cytosine deaminase is at least at least about 70% identical, at least about 80% identical, at least about 90% identical, at least about 95% identical, at least about 96% identical, at least about 97% identical, at least about 98% identical, at least about 99% identical, at least about 99.5% identical, or at least about 99.9% identical to an APOBEC3G variant as set forth in SEQ ID NO: 291 or SEQ ID NO: 292, and comprises mutations corresponding to the D316E/D317R mutations in SEQ ID NO: 290.

[0188] In some embodiments, the cytosine deaminase domain is fused to the N-terminus of the guide nucleotide sequence-programmable DNA-binding protein domain. For example, the fusion protein may have an architecture of NH₂-[cytosine deaminase]-[guide nucleotide sequence-programmable DNA-binding protein domain]-COOH. The “]-[” used in the general architecture above indicates the presence of an optional linker sequence. The term “linker,” as used herein, refers to a chemical group or a molecule linking two molecules or moieties, e.g., two domains of a fusion protein, such as, for example, a dCas9 domain and a cytosine deaminase domain. Typically, the linker is positioned between, or flanked by, two groups, molecules, or other moieties and connected to each one via a covalent bond, thus connecting the two. In some embodiments, the linker is an amino acid or a plurality of amino acids (e.g., a peptide or protein). In some embodiments, the linker is an organic molecule, group, polymer, or chemical moiety. In some embodiments, the linker is 5-100 amino acids in length, for example, 5, 6, 7, 8, 9, 10, 11, 12, 13, 14, 15, 16, 17, 18, 19, 20, 21, 22, 23, 24, 25, 26, 27, 28, 29, 30, 30-35, 35-40, 40-45, 45-50, 50-60, 60-70, 70-80, 80-90, 90-100, 100-150, or 150-200 amino acids in length. Longer or shorter linkers are also contemplated.

[0189] In some embodiments, the cytosine deaminase domain and the Cas9 domain are fused to each other via a linker. Various linker lengths and flexibilities between the deaminase domain (e.g., APOBEC1) and the Cas9 domain can be employed (e.g., ranging from very flexible linkers of the form (GGGS)ₙ (SEQ ID NO: 1998), (GGGGS)ₙ (SEQ ID NO: 308), (GGS)ₙ, and (G)ₙ to more rigid linkers of the form (EAAAK)ₙ (SEQ ID NO: 309), SGSETPGTSESATPES (SEQ ID NO: 310) (see, e.g., Guilinger et, al., Nat. Biotechnol. 2014; 32(6): 577-82; the entire contents are incorporated herein by reference), (XP)ₙ, or a combination of any of these, wherein X is any amino acid and n is independently an integer between 1 and 30, in order to achieve the optimal length for deaminase activity for the specific application. In some embodiments, n is independently 1, 2, 3, 4, 5, 6, 7, 8, 9, 10, 11, 12, 13, 14, 15, 16, 17, 18, 19, 20, 21, 22, 23, 24, 25, 26, 27, 28, 29, or 30, or, if more than one linker or more than one linker motif is present, any combination thereof. In some embodiments, the linker comprises a (GGS)ₙ motif, wherein n is 1, 2, 3, 4, 5, 6, 7, 8, 9, 10, 11, 12, 13, 14 or 15. In some embodiments, the linker comprises a (GGS)ₙ motif, wherein n is 1, 3, or 7. In some embodiments, the linker comprises the amino acid sequence SGSETPGTSESATPES (SEQ ID NO: 310), also referred to as the XTEN linker. In some embodiments, the linker comprises an amino acid sequence chosen from the group including, but not limited to, AGVF, GFLG, FK, AL, ALAL, or ALALA. In some embodiments, suitable linker motifs and configurations include those described in Chen et al., Fusion protein linkers: property, design and functionality. Adv Drug Deliv Rev. 2013; 65(10):1357-69, which is incorporated herein by reference. In some embodiments, the linker may comprise any of the following amino acid sequences: VPFLLEPDNINGKTC (SEQ ID NO: 311), GSAGSAAGSGEF (SEQ ID NO: 312), SIVAQLSRPDPA (SEQ ID NO: 313), MKIIEQLPSA (SEQ ID NO: 314), VRHKLKRVGS (SEQ ID NO: 315), GHGTGSTGSGSS (SEQ ID NO: 316), MSRPDPA (SEQ ID NO: 317), GSAGSAAGSGEF (SEQ ID NO: 312), SGSETPGTSESA (SEQ ID NO: 318), SGSETPGTSESATPEGGSGGS (SEQ ID NO: 319), or GGSM (SEQ ID NO: 320). Additional suitable linker sequences will be apparent to those of skill in the art based on the instant disclosure.

[0190] To successfully edit the desired target C base, the linker between Cas9 and APOBEC may be optimized, as described in Komor et al., Nature, 533, 420-424 (2016), which is incorporated herein by reference. The numbering scheme for base editing is based on the predicted location of the target C within the single stranded stretch of DNA (R-loop) displaced by a programmable guide RNA sequence occurring when a DNA-binding domain (e.g. Cas9, nCas9, dCas9) binds a genomic site (see FIG. 6). Conveniently, the sequence immediately surrounding the target C also matches the sequence of the guide RNA. The numbering scheme for base editing is based on a standard 20-mer programmable sequence, and defines position “21” as the first DNA base of the PAM sequence, resulting in position “1” assigned to the first DNA base matching the 5′-end of the 20-mer programmable guide RNA sequence. Therefore, for all Cas9 variants, position “21” is defined as the first base of the PAM sequence (e.g. NGG, NGAN, NGNG, NGAG, NGCG, NNGRRT, NGRRN, NNNRRT, NNNGATT, NNAGAA, NAAAC). When a longer programmable guide RNA sequence is used (e.g. 21-mer) the 5′-end bases are assigned a decreasing negative number starting at “−1”. For other DNA-binding domains that differ in the position of the PAM sequence, or that require no PAM sequence, the programmable guide RNA sequence is used as a reference for numbering. A 3-aa linker gives a 2-5 base editing window (e.g., positions 2, 3, 4, or 5 relative to the PAM sequence at position 21). A 9-aa linker gives a 3-6 base editing window (e.g., positions 3, 4, 5, or 6 relative to the PAM sequence at position 21). A 16-aa linker (e.g., the SGSETPGTSESATPES (SEQ ID NO: 310) linker) gives a 4-7 base editing window (e.g., positions 4, 5, 6, or 7 relative to the PAM sequence at position 21). A 21-aa linker gives a 5-8 base editing window (e.g., positions 5, 6, 7, 8 relative to the PAM sequence at position 21). Each of these windows can be useful for editing different targeted C bases. For example, the targeted C bases may be at different distances from the adjacent PAM sequence, and by varying the linker length, the precise editing of the desired C base is ensured. One skilled in the art, based on the teachings of CRISPR/Cas9 technology, in particular the teachings of U.S. Provisional Application Ser. Nos. 62/245,828, 62/279,346, 62/311,763, 62/322,178, 62/357,352, 62/370,700, and 62/398,490, and in Komor et al., Nature, Programmable editing of a target base in genomic DNA without double-stranded DNA cleavage, 533, 420-424 (2016), each of which is incorporated herein by reference, will be able to determine the window of editing for his/her purpose, and properly design the linker of the cytosine deaminase-dCas9 protein for the precise targeting of the desired C base.

[0191] To successfully edit the desired target C base, approporiate Cas9 domain may be selected to attached to the deaminase domain (e.g., APOBEC1), since different Cas9 domains may lead to different editing windows, as described in U.S. Provisional Application Ser. Nos. 62/245,828, 62/279,346, 62/311,763, 62/322,178, 62/357,352, 62/370,700, and 62/398,490, and in Komor et al., Nature, 533, 420-424 (2016), each of which is incorporated herein by reference. For example, APOBEC1-XTEN-SaCas9n-UGI gives a 1-12 base editing window (e.g., positions 1, 2, 3, 4, 5, 6, 7, 8, 9, 10, 11, or 12 relative to the NNNRRT PAM sequence in positions 20-26). One skilled in the art, based on the teachings of CRISPR/Cas9 technology, will be able to determine the editing window for his/her purpose, and properly determine the required Cas9 homolog and linker attached to the cytosine deaminase for the precise targeting of the desired C base.

[0192] In some embodiments, the fusion protein useful in the present disclosure further comprises a uracil glycosylase inhibitor (UGI) domain. A “uracil glycosylase inhibitor” refers to a protein that inhibits the activity of uracil-DNA glycosylase. The C to T base change induced by deamination results in a U:G heteroduplex, which triggers cellular DNA-repair response. Uracil DNA glycosylase (UDG) catalyzes removal of U from DNA in cells and initiates base excision repair, with reversion of the U:G pair to a C:G pair as the most common outcome. Thus, such cellular DNA-repair response may be responsible for the decrease in nucleobase editing efficiency in cells. Uracil DNA Glycosylase Inhibitor (UGI) is known in the art to potently blocks human UDG activity. As described in Komor et al., Nature (2016), fusing a UGI domain to the cytidine deaminase-dCas9 fusion protein reduced the activity of UDG and significantly enhanced editing efficiency.

[0193] Suitable UGI protein and nucleotide sequences are provided herein and additional suitable UGI sequences are known to those in the art, and include, for example, those published in Wang et al., Uracil-DNA glycosylase inhibitor gene of bacteriophage PBS2 encodes a binding protein specific for uracil-DNA glycosylase. J. Biol. Chem. 264:1163-1171(1989); Lundquist et al., Site-directed mutagenesis and characterization of uracil-DNA glycosylase inhibitor protein. Role of specific carboxylic amino acids in complex formation with Escherichia coli uracil-DNA glycosylase. J. Biol. Chem. 272:21408-21419(1997); Ravishankar et al., X-ray analysis of a complex of Escherichia coli uracil DNA glycosylase (EcUDG) with a proteinaceous inhibitor. The structure elucidation of a prokaryotic UDG. Nucleic Acids Res. 26:4880-4887(1998); and Putnam et al., Protein mimicry of DNA from crystal structures of the uracil-DNA glycosylase inhibitor protein and its complex with Escherichia coli uracil-DNA glycosylase. J. Mol. Biol. 287:331-346(1999), each of which is incorporated herein by reference. In some embodiments, the UGI comprises the following amino acid sequence: Bacillus phage PBS2 (Bacteriophage PBS2) Uracil-DNA glycosylase inhibitor MTNLSDIIEKETGKQLVIQESILMLPEEVEEVIGNKPESDILVHTAYDESTDENVMLLTSDAPEYKPWALVIQ DSNGENKIKML (SEQ ID NO: 304)

[0194] In some embodiments, the UGI protein comprises a wild type UGI or a UGI as set forth in SEQ ID NO: 304. In some embodiments, the UGI proteins useful in the present disclosure include fragments of UGI and proteins homologous to a UGI or a UGI fragment. For example, in some embodiments, a UGI comprises a fragment of the amino acid sequence set forth in SEQ ID NO: 304. In some embodiments, a UGI comprises an amino acid sequence homologous to the amino acid sequence set forth in SEQ ID NO: 304 or an amino acid sequence homologous to a fragment of the amino acid sequence set forth in SEQ ID NO: 304. In some embodiments, proteins comprising UGI or fragments of UGI or homologs of UGI or UGI fragments are referred to as “UGI variants.” A UGI variant shares homology to UGI, or a fragment thereof. For example a UGI variant is at least about 70% identical, at least about 80% identical, at least about 90% identical, at least about 95% identical, at least about 96% identical, at least about 97% identical, at least about 98% identical, at least about 99% identical, at least about 99.5% identical, or at least about 99.9% to a wild type UGI or a UGI as set forth in SEQ ID NO: 304. In some embodiments, the UGI variant comprises a fragment of UGI, such that the fragment is at least about 70% identical, at least about 80% identical, at least about 90% identical, at least about 95% identical, at least about 96% identical, at least about 97% identical, at least about 98% identical, at least about 99% identical, at least about 99.5% identical, or at least about 99.9% to the corresponding fragment of wild type UGI or a UGI as set forth in SEQ ID NO: 304.

[0195] It should be appreciated that additional proteins may be uracil glycosylase inhibitors. For example, other proteins that are capable of inhibiting (e.g., sterically blocking) a uracil-DNA glycosylase base-excision repair enzyme are within the scope of this disclosure. In some embodiments, a uracil glycosylase inhibitor is a protein that binds DNA. In some embodiments, a uracil glycosylase inhibitor is a protein that binds single-stranded DNA. For example, a uracil glycosylase inhibitor may be a Erwinia tasmaniensis single-stranded binding protein. In some embodiments, the single-stranded binding protein comprises the amino acid sequence (SEQ ID NO: 305). In some embodiments, a uracil glycosylase inhibitor is a protein that binds uracil. In some embodiments, a uracil glycosylase inhibitor is a protein that binds uracil in DNA. In some embodiments, a uracil glycosylase inhibitor is a catalytically inactive uracil DNA-glycosylase protein. In some embodiments, a uracil glycosylase inhibitor is a catalytically inactive uracil DNA-glycosylase protein that does not excise uracil from the DNA. For example, a uracil glycosylase inhibitor is a UdgX. In some embodiments, the UdgX comprises the amino acid sequence (SEQ ID NO: 306). As another example, a uracil glycosylase inhibitor is a catalytically inactive UDG. In some embodiments, a catalytically inactive UDG comprises the amino acid sequence (SEQ ID NO: 307). It should be appreciated that other uracil glycosylase inhibitors would be apparent to the skilled artisan and are within the scope of this disclosure. In some embodiments, the fusion protein comprises a guide nucleotide sequence-programmable DNA-binding protein, a cytidine deaminase domain, a Gam protein, and a UGI domain. In some embodiments, any of the fusion proteins provided herein that comprise a guide nucleotide sequence-programmable DNA-binding protein (e.g., a Cas9 domain), a cytidine deaminase, and a Gam protein may be further fused to a UGI domain either directly or via a linker. This disclosure also contemplates a fusion protein comprising a Cas9 nickase-nucleic acid editing domain fused to a cytidine deaminase, and a Gam protein, which is further fused to a UGI domain.

Erwinia tasmaniensis SSB (themostable single-
stranded DNA binding protein)

(SEQ ID NO: 305)

MASRGVNKVILVGNLGQDPEVRYMPNGGAVANITLATSESWRDKQTGETK
EKTEWHRVVLFGKLAEVAGEYLRKGSQVYIEGALQTRKWTDQAGVEKYTT
EVVVNVGGTMQMLGGRSQGGGASAGGQNGGSNNGWGQPQQPQGGNQFSGG
AQQQARPQQQPQQNNAPANNEPPIDFDDDIP
UdgX (binds to Uracil in DNA but does not excise)

(SEQ ID NO: 306)

MAGAQDFVPHTADLAELAAAAGECRGCGLYRDATQAVFGAGGRSARIMMI
GEQPGDKEDLAGLPFVGPAGRLLDRALEAADIDRDALYVTNAVKHFKFTR
AAGGKRRIHKTPSRTEVVACRPWLIAEMTSVEPDVVVLLGATAAKALLGN
DFRVTQHRGEVLHVDDVPGDPALVATVHPSSLLRGPKEERESAFAGLVDD
LRVAADVRP
UDG (catalytically inactive human UDG, binds to
Uracil in DNAbut does not excise)

(SEQ ID NO: 307)

MIGQKTLYSFFSPSPARKRHAPSPEPAVQGTGVAGVPEESGDAAAIPAKK
APAGQEEPGTPPSSPLSAEQLDRIQRNKAAALLRLAARNVPVGFGESWKK
HLSGEFGKPYFIKLMGFVAEERKHYTVYPPPHQVFTWTQMCDIKDVKVVI
LGQEPYHGPNQAHGLCFSVQRPVPPPPSLENIYKELSTDIEDFVHPGHGD
LSGWAKQGVLLLNAVLTVRAHQANSHKERGWEQFTDAVVSWLNQNSNGLV
FLLWGSYAQKKGSAIDRKRHHVLQTAHPSPLSVYRGFFGCRHFSKTNELL
QKSGKKPIDWKEL

[0196] In some embodiments, the UGI domain is fused to the C-terminus of the dCas9 domain in the fusion protein. Thus, the fusion protein would have an architecture of NH₂-[cytosine deaminase]-[guide nucleotide sequence-programmable DNA-binding protein domain]-[UGI]-COOH. In some embodiments, the UGI domain is fused to the N-terminus of the cytosine deaminase domain. As such, the fusion protein would have an architecture of NH₂-[UGI]-[cytosine deaminase]-[guide nucleotide sequence-programmable DNA-binding protein domain]-COOH. In some embodiments, the UGI domain is fused between the guide nucleotide sequence-programmable DNA-binding protein domain and the cytosine deaminase domain. As such, the fusion protein would have an architecture of NH₂-[cytosine deaminase]-[UGI]-[guide nucleotide sequence-programmable DNA-binding protein domain]-COOH. The linker sequences described herein may also be used for the fusion of the UGI domain to the cytosine deaminase-dCas9 fusion proteins.

[0197] In some embodiments, the fusion protein comprises the structure:

[cytosine deaminase]-[optional linker sequence]-[guide nucleotide sequence-programmable DNA binding protein]-[optional linker sequence]-[UGI];
[cytosine deaminase]-[optional linker sequence]-[UGI]-[optional linker sequence]-[guide nucleotide sequence-programmable DNA binding protein];
[UGI]-[optional linker sequence]-[cytosine deaminase]-[optional linker sequence]-[guide nucleotide sequence-programmable DNA binding protein];
[UGI]-[optional linker sequence]-[guide nucleotide sequence-programmable DNA binding protein]-[optional linker sequence]-[cytosine deaminase];
[guide nucleotide sequence-programmable DNA binding protein]-[optional linker sequence]-[cytosine deaminase]-[optional linker sequence]-[UGI]; or
[guide nucleotide sequence-programmable DNA binding protein]-[optional linker sequence]-[UGI]-[optional linker sequence]-[cytosine deaminase].

[0198] In some embodiments, the fusion protein comprises the structure:

[cytosine deaminase]-[optional linker sequence]-[Cas9 nickase]-[optional linker sequence]-[UGI];
[cytosine deaminase]-[optional linker sequence]-[UGI]-[optional linker sequence]-[Cas9 nickase];
[UGI]-[optional linker sequence]-[cytosine deaminase]-[optional linker sequence]-[Cas9 nickase];
[UGI]-[optional linker sequence]-[Cas9 nickase]-[optional linker sequence]-[cytosine deaminase];
[Cas9 nickase]-[optional linker sequence]-[cytosine deaminase]-[optional linker sequence]-[UGI]; or
[Cas9 nickase]-[optional linker sequence]-[UGI]-[optional linker sequence]-[cytosine deaminase].

[0199] In some embodiments, fusion proteins provided herein further comprise a nuclear localization sequence (NLS). In some embodiments, the NLS is fused to the N-terminus of the fusion protein. In some embodiments, the NLS is fused to the C-terminus of the fusion protein. In some embodiments, the NLS is fused to the N-terminus of the UGI protein. In some embodiments, the NLS is fused to the C-terminus of the UGI protein. In some embodiments, the NLS is fused to the N-terminus of the guide nucleotide sequence-programmable DNA-binding protein domain. In some embodiments, the NLS is fused to the C-terminus of the guide nucleotide sequence-programmable DNA-binding protein domain. In some embodiments, the NLS is fused to the N-terminus of the cytosine deaminase. In some embodiments, the NLS is fused to the C-terminus of the deaminase. In some embodiments, the NLS is fused to the fusion protein via one or more linkers. In some embodiments, the NLS is fused to the fusion protein without a linker. Non-limiting, exemplary NLS sequences may be PKKKRKV (SEQ ID NO: 1988) or MDSLLMNRRKFLYQFKNVRWAKGRRETYLC (SEQ ID NO: 1989).

[0200] Some aspects of the present disclosure provide nucleobase editors described herein associated with a guide nucleotide sequence (e.g., a guide RNA or gRNA). gRNAs can exist as a complex of two or more RNAs, or as a single RNA molecule. gRNAs that exist as a single RNA molecule may be referred to as single-guide RNAs (sgRNAs), though “gRNA” is used interchangeably to refer to guide RNAs that exist as either single molecules or as a complex of two or more molecules. Typically, gRNAs that exist as a single RNA species comprise two domains: (1) a domain that shares homology to a target nucleic acid (e.g., and directs binding of the Cas9 complex to the target); and (2) a domain that binds the Cas9 protein. In some embodiments, domain (2) corresponds to a sequence known as a tracrRNA, and comprises a stem-loop structure. For example, in some embodiments, domain (2) is identical or homologous to a tracrRNA as provided in Jinek et al., Science 337:816-821(2012), which is incorporated herein by reference. Other examples of gRNAs (e.g., those including domain 2) can be found in U.S. Provisional Patent Application, U.S. Ser. No. 61/874,682, filed Sep. 6, 2013, entitled “Switchable Cas9 Nucleases And Uses Thereof,” and U.S. Provisional Patent Application, U.S. Ser. No. 61/874,746, filed Sep. 6, 2013, entitled “Delivery System For Functional Nucleases,” each are hereby incorporated by reference in their entirety. The gRNA comprises a nucleotide sequence that complements a target site, which mediates binding of the nuclease/RNA complex to said target site, providing the sequence specificity of the nuclease:RNA complex. These proteins are able to be targeted, in principle, to any sequence specified by the guide RNA. Methods of using RNA-programmable nucleases, such as Cas9, for site-specific cleavage (e.g., to modify a genome) are known in the art (see e.g., Cong, L. et al. Science 339, 819-823 (2013); Mali, P. et al. Science 339, 823-826 (2013); Hwang, W. Y. et al. Nature biotechnology 31, 227-229 (2013); Jinek, M. et al. eLife 2, e00471 (2013); Dicarlo, J. E. et al. Nucleic acids research (2013); Jiang, W. et al. Nature biotechnology 31, 233-239 (2013); each of which are incorporated herein by reference). In particular, examples of guide nucleotide sequences (e.g., sgRNAs) that may be used to target the fusion protein of the present disclosure to its target sequence to deaminate the targeted C bases are described in Komor et al., Nature, 533, 420-424 (2016), which is incorporated herein by reference.

[0201] The specific structure of the guide nucleotide sequences (e.g., sgRNAs) depends on its target sequence and the relative distance of a PAM sequence downstream of the target sequence. One skilled in the art will understand, that no unifying structure of guide nucleotide sequence is given, for that he target sequences are different for each and every C targeted to be deaminated.

[0202] However, the present disclosure provides guidance in how to design the guide nucleotide sequence, e.g., an sgRNA, so that one skilled in the art may use such teaching to a target sequence of interest. An gRNA typically comprises a tracrRNA framework allowing for Cas9 binding, and a guide sequence, which confers sequence specificity to fusion proteins disclosed herein. In some embodiments, the guide RNA comprises a structure 5′-[guide sequence]-tracrRNA-3′. Non-limiting, exemplary tracrRNA sequences are shown in Table 17.

TABLE 17
TracrRNA othologues and sequences

| | | SEQ |
|---|---|---|
| | | ID |
| Organism | tracrRNA sequence | NO |
| S. pyogenes | GUUUAAGAGCUAUGCUGGAAAGCCACGGUGAA | 322 |
| | AAAGUUCAACUAUUGCCUGAUCGGAAUAAAUU | |
| | UGAACGAUACGACAGUCGGUGCUUUUUUU | |
| S. pyogenes | GUUUAAGAGCUAGAAAUAGCAAGUUUAAAUAA | 323 |
| | GGCUAGUCCGUUAUCAACUUGAAAAAGUGGCAC | |
| | CGAGUCGGUGCUUUUUU | |
| S. thermophilus CRISPR1 | GUUUUUGUACUCUCAAGAUUCAAUAAUCUUGC | 324 |
| | AGAAGCUACAAAGAUAAGGCUUCAUGCCGAAA | |
| | UCAACACCCUGUCAUUUUAUGGCAGGGUGUUUU | |
| S. thermophilus CRISPR3 | GUUUUAGAGCUGUGUUGUUUGUUAAAACAACA | 325 |
| | CAGCGAGUUAAAAUAAGGCUUAGUCCGUACUCA | |
| | ACUUGAAAAGGUGGCACCGAUUCGGUGUUUUU | |
| C. jejuni | AAGAAAUUUAAAAAGGGACUAAAAUAAAGAGU | 326 |
| | UUGCGGGACUCUGCGGGGUUACAAUCCCCUAAA | |
| | ACCGCUUUU | |
| F. novicida | AUCUAAAAUUAUAAAUGUACCAAAUAAUUAAU | 327 |
| | GCUCUGUAAUCAUUUAAAAGUAUUUUGAACGG | |
| | ACCUCUGUUUGACACGUCUGAAUAACUAAAA | |
| S. thermophilus2 | UGUAAGGGACGCCUUACACAGUUACUUAAAUCU | 328 |
| | UGCAGAAGCUACAAAGAUAAGGCUUCAUGCCGA | |
| | AAUCAACACCCUGUCAUUUUAUGGCAGGGUGUU | |
| | UUCGUUAUUU | |
| M. mobile | UGUAUUUCGAAAUACAGAUGUACAGUUAAGAA | 329 |
| | UACAUAAGAAUGAUACAUCACUAAAAAAAGGC | |
| | UUUAUGCCGUAACUACUACUUAUUUUCAAAAU | |
| | AAGUAGUUUUUUUU | |
| L. innocua | AUUGUUAGUAUUCAAAAUAACAUAGCAAGUUA | 330 |
| | AAAUAAGGCUUUGUCCGUUAUCAACUUUUAAU | |
| | UAAGUAGCGCUGUUUCGGCGCUUUUUUU | |
| S. pyogenes | GUUGGAACCAUUCAAAACAGCAUAGCAAGUUA | 331 |
| | AAAUAAGGCUAGUCCGUUAUCAACUUGAAAAA | |
| | GUGGCACCGAGUCGGUGCUUUUUUU | |
| S. mutans | GUUGGAAUCAUUCGAAACAACACAGCAAGUUA | 332 |
| | AAAUAAGGCAGUGAUUUUUAAUCCAGUCCGUA | |
| | CACAACUUGAAAAAGUGCGCACCGAUUCGGUGC | |
| | UUUUUUAUUU | |
| S. thermophilus | UUGUGGUUUGAAACCAUUCGAAACAACACAGCG | 333 |
| | AGUUAAAAUAAGGCUUAGUCCGUACUCAACUU | |
| | GAAAAGGUGGCACCGAUUCGGUGUUUUUUUU | |
| N. meningitidis | ACAUAUUGUCGCACUGCGAAAUGAGAACCGUUG | 334 |
| | CUACAAUAAGGCCGUCUGAAAAGAUGUGCCGCA | |
| | ACGCUCUGCCCCUUAAAGCUUCUGCUUUAAGGG | |
| | GCA | |
| P. multocida | GCAUAUUGUUGCACUGCGAAAUGAGAGACGUU | 335 |
| | GCUACAAUAAGGCUUCUGAAAAGAAUGACCGU | |
| | AACGCUCUGCCCCUUGUGAUUCUUAAUUGCAAG | |
| | GGGCAUCGUUUUU | |

The guide sequence of the gRNA comprises a sequence that is complementary to the target sequence. The guide sequence is typically about 20 nucleotides long. For example, the guide sequence may be 15-25 nucleotides long. In some embodiments, the guide sequence is 15, 16, 17, 18, 19, 20, 21, 22, 23, 24, or 25 nucleotides long. In some embodiments, the guide sequence is more than 25 nucleotides long. Such suitable guide RNA sequences typically comprise guide sequences that are complementary to a nucleic sequence within 50 nucleotides upstream or downstream of the target nucleotide to be edited.

[0203] In some embodiments, the guide RNA is about 15-100 nucleotides long and comprises a sequence of at least 10 contiguous nucleotides that is complementary to a target sequence. In some embodiments, the guide RNA is 15, 16, 17, 18, 19, 20, 21, 22, 23, 24, 25, 26, 27, 28, 29, 30, 31, 32, 33, 34, 35, 36, 37, 38, 39, 40, 41, 42, 43, 44, 45, 46, 47, 48, 49, or 50 nucleotides long. In some embodiments, the guide RNA comprises a sequence of 15, 16, 17, 18, 19, 20, 21, 22, 23, 24, 25, 26, 27, 28, 29, 30, 31, 32, 33, 34, 35, 36, 37, 38, 39, or 40 contiguous nucleotides that is complementary to a target sequence.

[0204] To edit the genes in the LDLR mediated cholesterol clearance pathway using the methods described herein, the nucleobase editor and/or the guide nucleotide sequence is introduced into the cell (e.g., a liver cell) where the editing occurs. In some embodiments, nucleic acid molecules (e.g., expression vectors) encoding the nucleobase editors and/or the guide nucleotide sequences are delivered into the cell, resulting in co-expression of nucleobase editors and/or the guide nucleotide sequences in the cell. The nucleic acid molecules encoding the nucleobase editors and/or the guide nucleotide sequences may be delivered into the cell using any known methods in the art, e.g., transfection (e.g., transfection mediated by cationic liposomes), transduction (e.g., via viral infection) and electroporation. In some embodiments, an isolated nucleobase editor/gRNA complex is delivered. Methods of delivering an isolated protein to a cell is familiar to those skilled in the art. For example, the isolated nucleobase editor in complex with a gRNA be associated with a supercharged, cell-penetrating protein or peptide, which facilitates its entry into a cell (e.g., as described in PCT Application Publication WO2010129023 and US Patent Application Publication US20150071906, incorporated herein by reference). In some embodiments, the isolated nucleobase editor incomplex with a gRNA may be delivered by a cationic transfection reagent, e.g., the Lipofectamine CRISPRMAX Cas9 Transfection Reagent from Thermofisher Scientific. In some embodiments, the nucleobase editor and the gRNA may be delivered separately. One skilled in the art is familiar with methods of delivering a nucleic acid molecule or an isolated protein.

### Fusion Proteins Comprising Gam

[0205] Some aspects of the disclosure provide fusion proteins comprising a Gam protein. Some aspects of the disclosure provide base editors that further comprise a Gam protein. Base editors are known in the art and have been described previously, for example, in U.S. Patent Application Publication Nos.: US-2015-0166980, published Jun. 18, 2015; US-2015-0166981, published Jun. 18, 2015; US-2015-0166984, published Jun. 18, 2015; US-2015-01669851, published Jun. 18, 2015; US-2016-0304846, published Oct. 20, 2016; US-2017-0121693-A1, published May 4, 2017; and PCT Application publication Nos.: WO 2015/089406, published Jun. 18, 2015; and WO 2017/070632, published Apr. 27, 2017; the entire contents of each of which are hereby incorporated by reference. A skilled artisan would understand, based on the disclosure, how to make and use base editors that further comprise a Gam protein.

[0206] In some embodiments, the disclosure provides fusion proteins comprising a guide nucleotide sequence-programmable DNA-binding protein and a Gam protein. In some embodiments, the disclosure provides fusion proteins comprising a cytidine deaminase domain and a Gam protein. In some embodiments, the disclosure provides fusion proteins comprising a UGI domain and a Gam protein. In some embodiments, the disclosure provides fusion proteins comprising a guide nucleotide sequence-programmable DNA-binding protein, a cytidine deaminase domain and a Gam protein. In some embodiments, the disclosure provides fusion proteins comprising a guide nucleotide sequence-programmable DNA-binding protein, a cytidine deaminase domain a Gam protein and a UGI domain.

[0207] In some embodiments, the Gam protein is a protein that binds to double strand breaks in DNA and prevents or inhibits degradation of the DNA at the double strand breaks. In some embodiments, the Gam protein is encoded by the bacteriophage Mu, which binds to double stranded breaks in DNA. Without wishing to be bound by any particular theory, Mu transposes itself between bacterial genomes and uses Gam to protect double stranded breaks in the transposition process. Gam can be used to block homologous recombination with sister chromosomes to repair double strand breaks, sometimes leading to cell death. The survival of cells exposed to UV is similar for cells expression Gam and cells where the recB is mutated. This indicates that Gam blocks DNA repair (Cox, 2013). The Gam protein can thus promote Cas9-mediated killing (Cui et al., 2016). GamGFP is used to label double stranded breaks, although this can be difficult in eukaryotic cells as the Gam protein competes with similar eukaryotic protein Ku (Shee et al., 2013).

[0208] Gam is related to Ku70 and Ku80, two eukaryotic proteins involved in non-homologous DNA end-joining (Cui et al., 2016). Gam has sequence homology with both subunits of Ku (Ku70 and Ku80), and can have a similar structure to the core DNA-binding region of Ku. Orthologs to Mu Gam are present in the bacterial genomes of Haemophilus influenzae, Salmonella typhi, Neisseria meningitidis and the enterohemorrhagic O157:H7 strain of E. coli (d'Adda di Fagagna et al., 2003). Gam proteins have been described previously, for example, in Cox, Proteins pinpoint double strand breaks. eLife. 2013; 2: e01561.; Cui et al., Consequences of Cas9 cleavage in the chromosome of Escherichia coli. Nucleic Acids Res. 2016 May 19; 44(9):4243-51. doi: 10.1093/nar/gkw223. Epub 2016 Apr. 8.; d'Adda di Fagana et al., The Gam protein of bacteriophage Mu is an orthologue of eukaryotic Ku. EMBO Rep. 2003 January; 4(1):47-52.; and Shee et al., Engineered proteins detect spontaneous DNA breakage in human and bacterial cells. Elife. 2013 Oct. 29; 2:e01222. doi: 10.7554/eLife.01222; the contents of each of which are incorporated herein by reference.

[0209] In some embodiments, the Gam protein is a protein that binds double strand breaks in DNA and prevents or inhibits degradation of the DNA at the double strand breaks. In some embodiments, the Gam protein is a naturally occurring Gam protein from any organism (e.g., a bacterium), for example, any of the organisms provided herein. In some embodiments, the Gam protein is a variant of a naturally-occurring Gam protein from an organism. In some embodiments, the Gam protein does not occur in nature. In some embodiments, the Gam protein is at least 50%, at least 55%, at least 60%, at least 65%, at least 70%, at least 75% at least 80%, at least 85%, at least 90%, at least 95%, at least 96%, at least 97%, at least 98%, at least 99%, or at least 99.5% identical to a naturally-occurring Gam protein. In some embodiments, the Gam protein is at least 50%, at least 55%, at least 60%, at least 65%, at least 70%, at least 75% at least 80%, at least 85%, at least 90%, at least 95%, at least 96%, at least 97%, at least 98%, at least 99%, or at least 99.5% identical to any of the Gam proteins provided herein (e.g., SEQ ID NO: 2030). Exemplary Gam proteins are provided below. In some embodiments, the Gam protein comprises the amino acid sequence of any one of SEQ ID NOs: 2030-2058. In some embodiments, the Gam protein is a truncated version of any of the Gam proteins provided herein. In some embodiments, the truncated Gam protein is missing 1, 2, 3, 4, 5, 6, 7, 8, 9, 10, 11, 12, 13, 14, 15, 6, 17, 18, 19, or 20 N-terminal amino acid residues relative to a full-length Gam protein. In some embodiments, the truncated Gam protein may be missing 1, 2, 3, 4, 5, 6, 7, 8, 9, 10, 11, 12, 13, 14, 15, 6, 17, 18, 19, or 20 C-terminal amino acid residues relative to a full-length Gam protein. In some embodiments, the Gam protein does not comprise an N-terminal methionine.

[0210] In some embodiments, the Gam protein comprises an amino acid sequence that is at least 60%, 65%, 70%, 75%, 80%, 85%, 90%, 95, 98%, 99%, or 99.5% identical to any of the Gam proteins provided herein. In some embodiments, the Gam protein comprises an amino acid sequence that has 1, 2, 3, 4, 5, 6, 7, 8, 9, 10, 11, 12, 13, 14, 15, 16, 17, 18, 19, 20, 21, 22, 21, 24, 25, 26, 27, 28, 29, 30, 31, 32, 33, 34, 35, 36, 37, 38, 39, 40, 41, 42, 43, 44, 45, 46, 47, 48, 49, 50, or more mutations compared to any one of the Gam proteins provided herein. In some embodiments, the Gam protein comprises an amino acid sequence that has at least 5, at least 10, at least 15, at least 20, at least 25, at least 30, at least 35, at least 40, at least 45, at least 50, at least 60, at least 70, at least 80, at least 90, at least 100, at least 110, at least 120, at least 130, at least 140, at least 150, at least 160, or at least 170 identical contiguous amino acid residues as compared to any of the Gam proteins provided herein. In some embodiments, the Gam protein comprises the amino acid sequence of any of the Gam proteins provided herein. In some embodiments, the Gam protein consists of the amino acid sequence of any one of SEQ ID NOs: 2030-2058.

Gam from Bacteriophage Mu

(SEQ ID NO: 2030)

AKPAKRIKSAAAAYVPQNRDAVITDIKRIGDLQREASRLETEMNDAIAEI
TEKFAARIAPIKTDIETLSKGVQGWCEANRDELTNGGKVKTANLVTGDV
SWRVRPPSVSIRGMDAVMETLERLGLQRFIRTKQEINKEAILLEPKAVA
GVAGITVKSGIEDFSIIPFEQEAGI

>WP_001107930.1 MULTISPECIES: host-nuclease inhibitor protein Gam [Enterobacteriaceae]

(SEQ ID NO: 2031)

MAKPAKRIKSAAAAYVPQNRDAVITDIKRIGDLQREASRLETEMNDAIA
EITEKFAARIAPIKTDIETLSKGVQGWCEANRDELTNGGKVKTANLVTG
DVSWRVRPPSVSIRGMDAVMETLERLGLQRFIRTKQEINKEAILLEPKA
VAGVAGITVKSGIEDFSIIPFEQEAGI

>CAA27978.1 unnamed protein product [Escherichia virus Mu]

(SEQ ID NO: 2058)

MAKPAKRIKSAAAAYVPQNRDAVITDIKRIGDLQREASRLETEMNDAIA
EITEKFAARIAPIKTDIETLSKGVQGWCEANRDELTNGGKVKTANLVTG
DVSWRVRPPSVSIRGMDAVMETLERLGLQRFVRTKQEINKEAILLEPKA
VAGVAGITVKSGIEDFSIIPFEQEAGI

>WP_001107932.1 host-nuclease inhibitor protein Gam [Escherichia coli]

(SEQ ID NO: 2032)

MAKPAKRIKSAAAAYVPQNRDAVITDIKRIGDLQREASRLETEMNDAIA
EITEKFAARIAPLKTDIETLSKGVQGWCEANRDELTNGGKVKTANLVTG
DVSWRVRPPSVSIRGMDAVMETLERLGLQRFIRTKQEINKEAILLEPKA
VAGVAGITVKSGIEDFSIIPFEQEAGI

>WP_061335739.1 host-nuclease inhibitor protein Gam [Escherichia coli]

(SEQ ID NO: 2033)

MAKPAKRIKSAAAAYVPQNRDAVITDIKRIGDLQREASRLETEMNDAIA
EITEKFAARIAPIKTDIETLSKGVQGWCEANRDELTNGGKVKTANLITG
DVSWRVRPPSVSIRGMDAVMETLERLGLQRFIRTKQEINKEAILLEPKA
VAGVAGITVKSGIEDFSIIPFEQEAGI

>WP_001107937.1 MULTISPECIES: host-nuclease inhibitor protein Gam [Enterobacteriaceae] >EJL11163.1 bacteriophage Mu Gam like family protein [Shigella sonnei str. Moseley] >CSO81529.1 host-nuclease inhibitor protein [Shigella sonnei] >OCE38605.1 host-nuclease inhibitor protein Gam [Shigella sonnei] >SJK50067.1 host-nuclease inhibitor protein [Shigella sonnei] >SJK19110.1 host-nuclease inhibitor protein [Shigella sonnei] >SIY81859.1 host-nuclease inhibitor protein [Shigella sonnei] >SJJ34359.1 host-nuclease inhibitor protein [Shigella sonnei] >SJK07688.1 host-nuclease inhibitor protein [Shigella sonnei] >SJI95156.1 host-nuclease inhibitor protein [Shigella sonnei] >SIY86865.1 host-nuclease inhibitor protein [Shigella sonnei] >SJJ67303.1 host-nuclease inhibitor protein [Shigella sonnei] >SJJ18596.1 host-nuclease inhibitor protein [Shigella sonnei] >SIX52979.1 host-nuclease inhibitor protein [Shigella sonnei] >SJD05143.1 host-nuclease inhibitor protein [Shigella sonnei] >SJD37118.1 host-nuclease inhibitor protein [Shigella sonnei] >SJE51616.1 host-nuclease inhibitor protein [Shigella sonnei]

(SEQ ID NO: 2034)

MAKPAKRIRNAAAAYVPQSRDAVVCDIRRIGDLQREAARLETEMNDAIA
EITEKYASQIAPLKTSIETLSKGVQGWCEANRDELTNGGKVKTANLVTG
DVSWRQRPPSVSIRGVDAVMETLERLGLQRFIRTKQEINKEAILLEPKA
VAGVAGITVKSGIEDFSIIPFEQEAGI

>WP_001107930.1 MULTISPECIES: host-nuclease inhibitor protein Gam [Enterobacteriaceae]

(SEQ ID NO: 2035)

MAKPAKRIKSAAAAYVPQNRDAVITDIKRIGDLQREASRLETEMNDAIA
EITEKFAARIAPIKTDIETLSKGVQGWCEANRDELTNGGKVKTANLVTG
DVSWRVRPPSVSIRGMDAVMETLERLGLQRFIRTKQEINKEAILLEPKA
VAGVAGITVKSGIEDFSIIPFEQEAGI

>CAA27978.1 unnamed protein product [Escherichia virus Mu]

(SEQ ID NO: 2036)

MAKPAKRIKSAAAAYVPQNRDAVITDIKRIGDLQREASRLETEMNDAIA
EITEKFAARIAPIKTDIETLSKGVQGWCEANRDELTNGGKVKTANLVTG
DVSWRVRPPSVSIRGMDAVMETLERLGLQRFVRTKQEINKEAILLEPKA
VAGVAGITVKSGIEDFSIIPFEQEAGI

>WP_001107932.1 host-nuclease inhibitor protein Gam [Escherichia coli]

(SEQ ID NO: 2037)

MAKPAKRIKSAAAAYVPQNRDAVITDIKRIGDLQREASRLETEMNDAIA
EITEKFAARIAPLKTDIETLSKGVQGWCEANRDELTNGGKVKTANLVTG
DVSWRVRPPSVSIRGMDAVMETLERLGLQRFIRTKQEINKEAILLEPKA
VAGVAGITVKSGIEDFSIIPFEQEAGI

>WP_061335739.1 host-nuclease inhibitor protein Gam [Escherichia coli]

(SEQ ID NO: 2038)

MAKPAKRIKSAAAAYVPQNRDAVITDIKRIGDLQREASRLETEMNDAIA
EITEKFAARIAPIKTDIETLSKGVQGWCEANRDELTNGGKVKTANLITG
DVSWRVRPPSVSIRGMDAVMETLERLGLQRFIRTKQEINKEAILLEPKA
VAGVAGITVKSGIEDFSIIPFEQEAGI

>WP_089552732.1 host-nuclease inhibitor protein Gam [Escherichia coli]

(SEQ ID NO: 2039)

MAKPAKRIKNAAAAYVPQSRDAVVCDIRRIGDLQREAARLETEMNDAIA
EITEKYASQIAPLKTSIETISKGVQGWCEANRDELTNGGKVKTANLVTG
DVSWRQRPPSVSIRGVDAVMETLERLGLQRFIRTKQEINKEAILLEPKA
VAGVAGITVKSGIEDFSIIPFEQEAGI

>WP_042856719.1 host-nuclease inhibitor protein Gam [Escherichia coli] >CDL02915.1 putative host-nuclease inhibitor protein [Escherichia coli IS35]

(SEQ ID NO: 2040)

MAKPAKRIKNAAAAYVPQSRDAVVCDIRRIGDLQREAARLETEMNDAIA
DITEKYASQIAPLKTSIETLSKGVQGWCEANRDELTNGGKVKTANLVTG
DVSWRQRPPSVSIRGVDAVMETLERLGLQRFIRTKQEINKEAILLEPKA
VAGVAGITVKSGIEDFSIIPFEQEAGI

>WP_001129704.1 host-nuclease inhibitor protein Gam [Escherichia coli] >EDU62392.1 bacteriophage Mu Gam like protein [Escherichia coli 53638]

(SEQ ID NO: 2041)

MAKSAKRIRNAAAAYVPQSRDAVVCDIRRIGNLQREAARLETEMNDAIA
EITEKFAARIAPLKTDIETLSKGVQGWCEANRDELTNGGKVKTANLVTG
DVSWRQRPPSVSIRGVDAVMETLERLGLQRFIRTKQEINREAILLEPKA
VAGVAGITVKSGIEDFSIIPFEQDAGI

>WP_001107936.1 MULTISPECIES: host-nuclease inhibitor protein Gam [Enterobacteriaceae] >EGI94970.1 host-nuclease inhibitor protein gam [Shigella boydii 5216-82] >CSR34065.1 host-nuclease inhibitor protein [Shigella sonnei] >CSQ65903.1 host-nuclease inhibitor protein [Shigella sonnei] >CSQ94361.1 host-nuclease inhibitor protein [Shigella sonnei] >SJK23465.1 host-nuclease inhibitor protein [Shigella sonnei] >SJB59111.1 host-nuclease inhibitor protein [Shigella sonnei] >SJI55768.1 host-nuclease inhibitor protein [Shigella sonnei] >SJI56601.1 host-nuclease inhibitor protein [Shigella sonnei] >SJJ20109.1 host-nuclease inhibitor protein [Shigella sonnei] >SJJ54643.1 host-nuclease inhibitor protein [Shigella sonnei] >SJI29650.1 host-nuclease inhibitor protein [Shigella sonnei] >SIZ53226.1 host-nuclease inhibitor protein [Shigella sonnei] >SJA65714.1 host-nuclease inhibitor protein [Shigella sonnei] >SJJ21793.1 host-nuclease inhibitor protein [Shigella sonnei] >SJD61405.1 host-nuclease inhibitor protein [Shigella sonnei] >SJJ14326.1 host-nuclease inhibitor protein [Shigella sonnei] >SIZ57861.1 host-nuclease inhibitor protein [Shigella sonnei] >SJD58744.1 host-nuclease inhibitor protein [Shigella sonnei] >SJD84738.1 host-nuclease inhibitor protein [Shigella sonnei] >SJJ51125.1 host-nuclease inhibitor protein [Shigella sonnei] >SJD01353.1 host-nuclease inhibitor protein [Shigella sonnei] >SJE63176.1 host-nuclease inhibitor protein [Shigella sonnei]

(SEQ ID NO: 2042)

MAKPAKRIRNAAAAYVPQSRDAVVCDIRRIGDLQREAARLETEMNDAIA
EITEKYASQIAPLKTSIETLSKGVQGWCEANRDELTNGGKVKTANLVTG
DVSWRQRPPSVSIRGVDAVMETLERLGLQRFIRTKQEINKEAILLEPKA
VAGVAGITVKSGIEDFSIIPFEQDAGI

>WP_050939550.1 host-nuclease inhibitor protein Gam [Escherichia coli] >KNF77791.1 host-nuclease inhibitor protein Gam [Escherichia coli]

(SEQ ID NO: 2043)

MAKPAKRIKNAAAAYVPQSRDAVVCDIRRIGDLQREAARLETEMNDAIA
EITEKYASQIAPLKTSIETLSKGVQGWCEANRDELTNGGKVKTANLVTG
DVSWRLRPPSVSIRGVDAVMETLERLGLQRFICTKQEINKEAILLEPKV
VAGVAGITVKSGIEDFSIIPFEQEAGI

>WP_085334715.1 host-nuclease inhibitor protein Gam [Escherichia coli] >OSC16757.1 host-nuclease inhibitor protein Gam [Escherichia coli]

(SEQ ID NO: 2044)

MAKPVKRIRNAAAAYVPQSRDAVVCDIRRIGDLQREAARLETEMNDAIAE
ITEKYASQIAPLKTSIETLSKGIQGWCEANRDELTNGGKVKTANLVTGDV
SWRQRPPSVSIRGVDAVMETLERLGLQRFIRTKQEINKEAILLEPKAVAG
VAGITVKSGIEDFSIIPFEQEAGI

>WP_065226797.1 host-nuclease inhibitor protein Gam [Escherichia coli] >ANO88858.1 host-nuclease inhibitor protein Gam [Escherichia coli] >ANO89006.1 host-nuclease inhibitor protein Gam [Escherichia coli]

(SEQ ID NO: 2045)

MAKPAKRIRNAAAAYVPQSRDAVVCDIRWIGDLQREAVRLETEMNDAIAE
ITEKYASRIAPLKTRIETLSKGVQGWCEANRDELTNGGKVKTANLVTGDV
SWRQRPPSVSIRGVDAVMETLERLGLQRFIRTKQEINKEAILLEPKAVAG
VAGITVKSGIEDFSIIPFEQEAGI

>WP_032239699.1 host-nuclease inhibitor protein Gam [Escherichia coli] >KDU26235.1 bacteriophage Mu Gam like family protein [Escherichia coli 3-373-03_S4_C2] >KDU49057.1 bacteriophage Mu Gam like family protein [Escherichia coli 3-373-03_S4_C1] >KEL21581.1 bacteriophage Mu Gam like family protein [Escherichia coli 3-373-03_S4_C3]

(SEQ ID NO: 2046)

MAKSAKRIRNAAATYVPQSRDAVVCDIRRIGDLQREAARLETEMNDAIAE
ITEKYASQIAPLKTSIETLSKGIQGWCEANRDELTNGGKVKTANLVTGDV
SWRQRPPSVSIRGVDAVMETLERLGLQRFIRTKQEINKEAILLEPKAVAG
VAGITVKSGIEDFSIIPFEQEAGI

>WP_080172138.1 host-nuclease inhibitor protein Gam [Salmonella enterica]

(SEQ ID NO: 2047)

MAKSAKRIKSAAATYVPQSRDAVVCDIRRIGDLQREAARLETEMNDAIAE
ITEKYASQIAPLKTSIETLSKGVQGWCEANRDELTNGGKVKSANLVTGDV
QWRQRPPSVSIRGVDAVMETLERLGLQRFIRTKQEINKEAILLEPKAVAG
VAGITVKSGIEDFSIIPFEQEAGI

>WP_077134654.1 host-nuclease inhibitor protein Gam [Shigella sonnei] >SIZ51898.1 host-nuclease inhibitor protein [Shigella sonnei] >SJK07212.1 host-nuclease inhibitor protein [Shigella sonnei]

(SEQ ID NO: 2048)

MAKSAKRIRNAAAAYVPQSRDAVVCDIRRIGNLQREAARLETEMNDAIAE
ITEKYASQIAPLKTSIETLSKGVQGWCEANRDELTNGGKVKTANLVTGDV
SWRQRPPSVSIRGVDAVMETLERLGLQRFIRTKQEINKEAILLEPKAVAG
VAGITVKSGIEDFSIIPFEQDAGI

>WP_000261565.1 host-nuclease inhibitor protein Gam [Shigella flexneri] >EGK20651.1 host-nuclease inhibitor protein gam [Shigella flexneri K-272] >EGK34753.1 host-nuclease inhibitor protein gam [Shigella flexneri K-227]

(SEQ ID NO: 2049)

MVVSAIASTPHDAVVCDIRRIGDLQREAARLETEMNDAIAEITEKDASQI
APLKTSIETLSKGVQGWCEANRDELTNGGKVKTANLVTGDVSWRQRPPSV
SIRGVDAVMETLERLGLQRFIRTKQEINKEAILLEPKAVAGVAGITVKSG
IEDFSIIPFEQEAGI

>ASG63807.1 host-nuclease inhibitor protein Gam [Kluyvera georgiana]

(SEQ ID NO: 2050)

MVSKPKRIKAAAANYVSQSRDAVITDIRKIGDLQREATRLESAMNDEIAV
ITEKYAGLIKPLKADVEMLSKGVQGWCEANRDDLTSNGKVKTANLVTGDI
QWRIRPPSVSVRGPDAVMETLTRLGLSRFIRTKQEINKEAILNEPLAVAG
VAGITVKSGIEDFSIIPFEQTADI

>WP_078000363.1 host-nuclease inhibitor protein Gam [Edwardsiella tarda]

(SEQ ID NO: 2051)

MASKPKRIKSAAANYVSQSRDAVIIDIRKIGDLQREATRLESAMNDEIAV
ITEKYAGLIKPLKADVEMLSKGVQGWCEANRDELTCNGKVKTANLVTGDI
QWRIRPPSVSVRGPDSVMETLLRLGLSRFIRTKQEINKEAILNEPLAVAG
VAGITVKTGVEDFSIIPFEQTADI

>WP_047389411.1 host-nuclease inhibitor protein Gam [Citrobacter freundii] >KGY86764.1 host-nuclease inhibitor protein Gam [Citrobacter freundii] >OIZ37450.1 host-nuclease inhibitor protein Gam [Citrobacter freundii]

(SEQ ID NO: 2052)

MVSKPKRIKAAAANYVSQSKEAVIADIRKIGDLQREATRLESAMNDEIAV
ITEKYAGLIKPLKTDVEILSKGVQGWCEANRDELTSNGKVKTANLVTGDI
QWRIRPPSVAVRGPDAVMETLLRLGLSRFIRTKQEINKEAILNEPLAVAG
VAGITVKSGVEDFSIIPFEQTADI

>WP_058215121.1 host-nuclease inhibitor protein Gam [Salmonella enterica] >KSU39322.1 host-nuclease inhibitor protein Gam [Salmonella enterica subsp. enterica] >OHJ24376.1 host-nuclease inhibitor protein Gam [Salmonella enterica] >ASG15950.1 host-nuclease inhibitor protein Gam [Salmonella enterica subsp. enterica serovar Macclesfield str. S-1643]

(SEQ ID NO: 2053)

MASKPKRIKAAAALYVSQSREDVVRDIRMIGDFQREIVRLETEMNDQIAA
VTLKYADKIKPLQEQLKTLSEGVQNWCEANRSDLTNGGKVKTANLVTGDV
QWRVRPPSVTVRGVDSVMETLRRLGLSRFIRIKEEINKEAILNEPGAVAG
VAGITVKSGVEDFSIIPFEQSATN

>WP_016533308.1 phage host-nuclease inhibitor protein Gam [Pasteurella multocida] >EPE65165.1 phage host-nuclease inhibitor protein Gam [Pasteurella multocida P1933] >ESQ71800.1 host-nuclease inhibitor protein Gam [Pasteurella multocida subsp. multocida P1062] >ODS44103.1 host-nuclease inhibitor protein Gam [Pasteurella multocida] >OPC87246.1 host-nuclease inhibitor protein Gam [Pasteurella multocida subsp. multocida] >OPC98402.1 host-nuclease inhibitor protein Gam [Pasteurella multocida subsp. multocida]

(SEQ ID NO: 2054)

MAKKATRIKTTAQVYVPQSREDVASDIKTIGDLNREITRLETEMNDKIAE
ITESYKGQFSPIQERIKNLSTGVQFWAEANRDQITNGGKTKTANLITGEV
SWRVRNPSVKITGVDSVLQNLKIHGLTKFIRVKEEINKEAILNEKHEVAG
IAGIKVVSGVEDFVITPFEQEI

>WP_005577487.1 host-nuclease inhibitor protein Gam [Aggregatibacter actinomycetemcomitans] >EHK90561.1 phage host-nuclease inhibitor protein Gam [Aggregatibacter actinomycetemcomitans RhAA1] >KNE77613.1 host-nuclease inhibitor protein Gam [Aggregatibacter actinomycetemcomitans RhAA1]

(SEQ ID NO: 2055)

MAKSATRVKATAQIYVPQTREDAAGDIKTIGDLNREVARLEAEMNDKIAA
ITEDYKDKFAPLQERIKTLSNGVQYWSEANRDQITNGGKTKTANLVTGEV
SWRVRNPSVKVTGVDSVLQNLRIHGLERFIRTKEEINKEAILNEKSAVAG
IAGIKVITGVEDFVITPFEQEAA

>WP_090412521.1 host-nuclease inhibitor protein Gam [Nitrosomonas halophila] >SDX89267.1 Mu-like prophage host-nuclease inhibitor protein Gam [Nitrosomonas halophila]

(SEQ ID NO: 2056)

MARNAARLKTKSIAYVPQSRDDAAADIRKIGDLQRQLTRTSTEMNDAIAA
ITQNFQPRMDAIKEQINLLQAGVQGYCEAHRHALTDNGRVKTANLITGEV
QWRQRPPSVSIRGQQVVLETLRRLGLERFIRTKEEVNKEAILNEPDEVRG
VAGLNVITGVEDFVITPFEQEQP

>WP_077926574.1 host-nuclease inhibitor protein Gam [Wohlfahrtiimonas larvae]

(SEQ ID NO: 2057)

MAKKRIKAAATVYVPQSKEEVQNDIREIGDISRKNERLETEMNDRIAEIT
NEYAPKFEVNKVRLELLTKGVQSWCEANRDDLTNSGKVKSANLVTGKVEW
RQRPPSISVKGMDAVIEWLQDSKYQRFLRTKVEVNKEAMLNEPEDAKTIP
GITIKSGIEDFAITPFEQEAGV

### Compositions

[0211] Aspects of the present disclosure relate to compositions that may be used for editing PCSK9-encoding polynucleotides. In some embodiments, the editing is carried out in vitro. In some embodiments, the editing is carried out in cultured cell. In some embodiments, the editing is carried out in vivo. In some embodiments, the editing is carried out in a mammal. In some embodiments, the mammal is a human. In some embodiments, the mammal may be a rodent. In some embodiments, the editing is carried out ex vivo.

[0212] In some embodiments, the composition comprises: (i) a fusion protein comprising: (a) a guide nucleotide sequence-programmable DNA binding protein domain; and (b) a cytosine deaminase domain; and (ii) a guide nucleotide sequence targeting the fusion protein of (i) to a polynucleotide encoding a Proprotein Convertase subtilisin/Kexin Type 9 (PCSK9) protein. In some embodiments, the fusion protein of (i) further comprises a Gam protein.

[0213] In some embodiments, the composition comprises: (i) a fusion protein comprising: (a) a guide nucleotide sequence-programmable DNA binding protein domain; and (b) a cytosine deaminase domain; (ii) a guide nucleotide sequence targeting the fusion protein of (i) to a polynucleotide encoding a Proprotein Convertase subtilisin/Kexin Type 9 (PCSK9) protein; and (ii) a guide nucleotide sequence targeting the fusion protein of (i) to a polynucleotide encoding an Apolipoprotein C3 protein. In some embodiments, the fusion protein of (i) further comprises a Gam protein.

[0214] In some embodiments, the composition comprises: (i) a fusion protein comprising: (a) a guide nucleotide sequence-programmable DNA binding protein domain; and (b) a cytosine deaminase domain; (ii) a guide nucleotide sequence targeting the fusion protein of (i) to a nucleic acid molecule polynucleotide encoding a Proprotein Convertase subtilisin/Kexin Type 9 (PCSK9) protein; (iii) a guide nucleotide sequence targeting the fusion protein of (i) to a polynucleotide encoding an Apolipoprotein C3 protein; and (iv) a guide nucleotide sequence targeting the fusion protein of (i) to a nucleic acid molecule polynucleotide encoding Low-Density Lipoprotein Receptor protein. In some embodiments, the fusion protein of (i) further comprises a Gam protein.

[0215] In some embodiments, the composition comprises: (i) a fusion protein comprising (a) a guide nucleotide sequence-programmable DNA binding protein domain; and (b) a cytosine deaminase domain; (ii) a guide nucleotide sequence targeting the fusion protein of (i) to a polynucleotide encoding a Proprotein Convertase subtilisin/Kexin Type 9 (PCSK9) protein; (iii) a guide nucleotide sequence targeting the fusion protein of (i) to a nucleic acid molecule polynucleotide encoding an Apolipoprotein C3 protein; (iv) a guide nucleotide sequence targeting the fusion protein of (i) to a polynucleotide encoding Low-Density Lipoprotein Receptor protein; and (v) a guide nucleotide sequence targeting the fusion protein of (i) to a polynucleotide encoding Inducible Degrader of the LDL receptor protein. In some embodiments, the fusion protein of (i) further comprises a Gam protein.

[0216] The guide nucleotide sequence used in the compositions described herein for editing the PCSK9-encoding polynucleotide is selected from SEQ ID NOs: 336-1309. The guide nucleotide sequence used in the compositions described herein for editing the APOC3-encoding polynucleotide is selected from SEQ ID NOs: 1806-1906. The guide nucleotide sequence used in the compositions described herein for editing the LDLR-encoding polynucleotide is selected from SEQ ID NOs: 1792-1799. The guide nucleotide sequence used in the compositions described herein for editing the IDOL-encoding polynucleotide is selected from SEQ ID NOs: 1788-1791. In some embodiments, the composition comprises a nucleic acid encoding a fusion protein described in and a guide nucleotide sequence described herein. In some embodiments, the composition described herein further comprises a pharmaceutically acceptable carrier. In some embodiments, the nucleobase editor (i.e., the fusion protein) and the gRNA are provided in two different compositions.

[0217] As used here, the term “pharmaceutically acceptable carrier” means a pharmaceutically acceptable material, composition or vehicle, such as a liquid or solid filler, diluent, excipient, manufacturing aid (e.g., lubricant, talc magnesium, calcium or zinc stearate, or steric acid), or solvent encapsulating material, involved in carrying or transporting the compound from one site (e.g., the delivery site) of the body, to another site (e.g., organ, tissue or portion of the body). A pharmaceutically acceptable carrier is “acceptable” in the sense of being compatible with the other ingredients of the formulation and not injurious to the tissue of the subject (e.g., physiologically compatible, sterile, physiologic pH, etc.). Some examples of materials which can serve as pharmaceutically-acceptable carriers include: (1) sugars, such as lactose, glucose and sucrose; (2) starches, such as corn starch and potato starch; (3) cellulose, and its derivatives, such as sodium carboxymethyl cellulose, methylcellulose, ethyl cellulose, microcrystalline cellulose and cellulose acetate; (4) powdered tragacanth; (5) malt; (6) gelatin; (7) lubricating agents, such as magnesium stearate, sodium lauryl sulfate and talc; (8) excipients, such as cocoa butter and suppository waxes; (9) oils, such as peanut oil, cottonseed oil, safflower oil, sesame oil, olive oil, corn oil and soybean oil; (10) glycols, such as propylene glycol; (11) polyols, such as glycerin, sorbitol, mannitol, and polyethylene glycol (PEG); (12) esters, such as ethyl oleate and ethyl laurate; (13) agar; (14) buffering agents, such as magnesium hydroxide and aluminum hydroxide; (15) alginic acid; (16) pyrogen-free water; (17) isotonic saline; (18) Ringer's solution; (19) ethyl alcohol; (20) pH buffered solutions; (21) polyesters, polycarbonates and/or polyanhydrides; (22) bulking agents, such as polypeptides and amino acids (23) serum component, such as serum albumin, HDL and LDL; (22) C2-C12 alcohols, such as ethanol; and (23) other non-toxic compatible substances employed in pharmaceutical formulations. Wetting agents, coloring agents, release agents, coating agents, sweetening agents, flavoring agents, perfuming agents, preservative and antioxidants can also be present in the formulation. The terms such as “excipient”, “carrier”, “pharmaceutically acceptable carrier” or the like are used interchangeably herein.

[0218] In some embodiments, the nucleobase editors and the guide nucleotides of the present disclosure in a composition is administered by injection, by means of a catheter, by means of a suppository, or by means of an implant, the implant being of a porous, non-porous, or gelatinous material, including a membrane, such as a sialastic membrane, or a fiber. In some embodiments, the injection is directed to the liver.

[0219] In other embodiments, the nucleobase editors and the guide nucleotides are delivered in a controlled release system. In one embodiment, a pump may be used (see, e.g., Langer, 1990, Science 249:1527-1533; Sefton, 1989, CRC Crit. Ref. Biomed. Eng. 14:201; Buchwald et al., 1980, Surgery 88:507; Saudek et al., 1989, N. Engl. J. Med. 321:574). In another embodiment, polymeric materials can be used. (See, e.g., Medical Applications of Controlled Release (Langer and Wise eds., CRC Press, Boca Raton, Fla., 1974); Controlled Drug Bioavailability, Drug Product Design and Performance (Smolen and Ball eds., Wiley, New York, 1984); Ranger and Peppas, 1983, Macromol. Sci. Rev. Macromol. Chem. 23:61. See also Levy et al., 1985, Science 228:190; During et al., 1989, Ann. Neurol. 25:351; Howard et al., 1989, J. Neurosurg. 71:105.) Other controlled release systems are discussed, for example, in Langer, supra.

[0220] In typical embodiments, the pharmaceutical composition is formulated in accordance with routine procedures as a pharmaceutical composition adapted for intravenous or subcutaneous administration to a subject, e.g., a human. Typically, compositions for administration by injection are solutions in sterile isotonic aqueous buffer. Where necessary, the pharmaceutical can also include a solubilizing agent and a local anesthetic such as lignocaine to ease pain at the site of the injection. Generally, the ingredients are supplied either separately or mixed together in unit dosage form, for example, as a dry lyophilized powder or water free concentrate in a hermetically sealed container such as an ampoule or sachette indicating the quantity of active agent. Where the pharmaceutical is to be administered by infusion, it can be dispensed with an infusion bottle containing sterile pharmaceutical grade water or saline. Where the pharmaceutical is administered by injection, an ampoule of sterile water for injection or saline can be provided so that the ingredients can be mixed prior to administration.

[0221] A pharmaceutical composition for systemic administration may be a liquid, e.g., sterile saline, lactated Ringer's or Hank's solution. In addition, the pharmaceutical composition can be in solid forms and re-dissolved or suspended immediately prior to use. Lyophilized forms are also contemplated.

[0222] The pharmaceutical composition can be contained within a lipid particle or vesicle, such as a liposome or microcrystal, which is also suitable for parenteral administration. The particles can be of any suitable structure, such as unilamellar or plurilamellar, so long as compositions are contained therein. Compounds can be entrapped in ‘stabilized plasmid-lipid particles’ (SPLP) containing the fusogenic lipid dioleoylphosphatidylethanolamine (DOPE), low levels (5-10 mol %) of cationic lipid, and stabilized by a polyethyleneglycol (PEG) coating (Zhang Y. P. et al., Gene Ther. 1999, 6:1438-47). Positively charged lipids such as N-[1-(2,3-dioleoyloxi)propyl]-N,N,N-trimethyl-amoniummethylsulfate, or “DOTAP,” are particularly preferred for such particles and vesicles. The preparation of such lipid particles is well known. See, e.g., U.S. Pat. Nos. 4,880,635; 4,906,477; 4,911,928; 4,917,951; 4,920,016; and 4,921,757.

[0223] The pharmaceutical compositions of this disclosure may be administered or packaged as a unit dose, for example. The term “unit dose” when used in reference to a pharmaceutical composition of the present disclosure refers to physically discrete units suitable as unitary dosage for the subject, each unit containing a predetermined quantity of active material calculated to produce the desired therapeutic effect in association with the required diluent; i.e., carrier, or vehicle.

[0224] In some embodiments, the nucleobase editors or the guide nucleotides described herein may be conjugated to a therapeutic moiety, e.g., an anti-inflammatory agent. Techniques for conjugating such therapeutic moieties to polypeptides, including e.g., Fc domains, are well known; see, e.g., Amon et al., “Monoclonal Antibodies For Immunotargeting Of Drugs In Cancer Therapy”, in Monoclonal Antibodies And Cancer Therapy, Reisfeld et al. (eds.), 1985, pp. 243-56, Alan R. Liss, Inc.); Hellstrom et al., “Antibodies For Drug Delivery”, in Controlled Drug Delivery (2nd Ed.), Robinson et al. (eds.), 1987, pp. 623-53, Marcel Dekker, Inc.); Thorpe, “Antibody Carriers Of Cytotoxic Agents In Cancer Therapy: A Review”, in Monoclonal Antibodies '84: Biological And Clinical Applications, Pinchera et al. (eds.), 1985, pp. 475-506); “Analysis, Results, And Future Prospective Of The Therapeutic Use Of Radiolabeled Antibody In Cancer Therapy”, in Monoclonal Antibodies For Cancer Detection And Therapy, Baldwin et al. (eds.), 1985, pp. 303-16, Academic Press; and Thorpe et al. (1982) “The Preparation And Cytotoxic Properties Of Antibody-Toxin Conjugates,” Immunol. Rev., 62:119-158.

[0225] Further, the compositions of the present disclosure may be assembled into kits. In some embodiments, the kit comprises nucleic acid vectors for the expression of the nucleobase editors described herein. In some embodiments, the kit further comprises appropriate guide nucleotide sequences (e.g., gRNAs) or nucleic acid vectors for the expression of such guide nucleotide sequences, to target the nucleobase editors to the desired target sequences.

[0226] The kit described herein may include one or more containers housing components for performing the methods described herein and optionally instructions of uses. Any of the kit described herein may further comprise components needed for performing the assay methods. Each component of the kits, where applicable, may be provided in liquid form (e.g., in solution), or in solid form, (e.g., a dry powder). In certain cases, some of the components may be reconstitutable or otherwise processible (e.g., to an active form), for example, by the addition of a suitable solvent or other species (for example, water or certain organic solvents), which may or may not be provided with the kit.

[0227] In some embodiments, the kits may optionally include instructions and/or promotion for use of the components provided. As used herein, “instructions” can define a component of instruction and/or promotion, and typically involve written instructions on or associated with packaging of the disclosure. Instructions also can include any oral or electronic instructions provided in any manner such that a user will clearly recognize that the instructions are to be associated with the kit, for example, audiovisual (e.g., videotape, DVD, etc.), Internet, and/or web-based communications, etc. The written instructions may be in a form prescribed by a governmental agency regulating the manufacture, use, or sale of pharmaceuticals or biological products, which can also reflect approval by the agency of manufacture, use or sale for animal administration. As used herein, “promoted” includes all methods of doing business including methods of education, hospital and other clinical instruction, scientific inquiry, drug discovery or development, academic research, pharmaceutical industry activity including pharmaceutical sales, and any advertising or other promotional activity including written, oral and electronic communication of any form, associated with the disclosure. Additionally, the kits may include other components depending on the specific application, as described herein.

[0228] The kits may contain any one or more of the components described herein in one or more containers. The components may be prepared sterilely, packaged in a syringe and shipped refrigerated. Alternatively it may be housed in a vial or other container for storage. A second container may have other components prepared sterilely. Alternatively the kits may include the active agents premixed and shipped in a vial, tube, or other container.

[0229] The kits may have a variety of forms, such as a blister pouch, a shrink wrapped pouch, a vacuum sealable pouch, a sealable thermoformed tray, or a similar pouch or tray form, with the accessories loosely packed within the pouch, one or more tubes, containers, a box or a bag. The kits may be sterilized after the accessories are added, thereby allowing the individual accessories in the container to be otherwise unwrapped. The kits can be sterilized using any appropriate sterilization techniques, such as radiation sterilization, heat sterilization, or other sterilization methods known in the art. The kits may also include other components, depending on the specific application, for example, containers, cell media, salts, buffers, reagents, syringes, needles, a fabric, such as gauze, for applying or removing a disinfecting agent, disposable gloves, a support for the agents prior to administration, etc.

### Therapeutics

[0230] The compositions described herein, may be administered to a subject in need thereof, in a therapeutically effective amount, to treat conditions related to high circulating cholesterol levels. Conditions related to high circulating cholesterol level that may be treated using the compositions and methods described herein include, without limitation: hypercholesterolemia, elevated total cholesterol levels, elevated low-density lipoprotein (LDL) levels, elevated LDL-cholesterol levels, reduced high-density lipoprotein levels, liver steatosis, coronary heart disease, ischemia, stroke, peripheral vascular disease, thrombosis, type 2 diabetes, high elevated blood pressure, atherosclerosis, obesity, Alzheimer's disease, neurodegeneration, and combinations thereof. The compositions and kits are effective in reducing the circulating cholesterol level in the subject, thus treating the conditions.

[0231] “A therapeutically effective amount” as used herein refers to the amount of each therapeutic agent of the present disclosure required to confer therapeutic effect on the subject, either alone or in combination with one or more other therapeutic agents. Effective amounts vary, as recognized by those skilled in the art, depending on the particular condition being treated, the severity of the condition, the individual subject parameters including age, physical condition, size, gender and weight, the duration of the treatment, the nature of concurrent therapy (if any), the specific route of administration and like factors within the knowledge and expertise of the health practitioner. These factors are well known to those of ordinary skill in the art and can be addressed with no more than routine experimentation. It is generally preferred that a maximum dose of the individual components or combinations thereof be used, that is, the highest safe dose according to sound medical judgment. It will be understood by those of ordinary skill in the art, however, that a subject may insist upon a lower dose or tolerable dose for medical reasons, psychological reasons or for virtually any other reasons. Empirical considerations, such as the half-life, generally will contribute to the determination of the dosage. For example, therapeutic agents that are compatible with the human immune system, such as polypeptides comprising regions from humanized antibodies or fully human antibodies, may be used to prolong half-life of the polypeptide and to prevent the polypeptide being attacked by the host's immune system.

[0232] Frequency of administration may be determined and adjusted over the course of therapy, and is generally, but not necessarily, based on treatment and/or suppression and/or amelioration and/or delay of a disease. Alternatively, sustained continuous release formulations of a polypeptide or a polynucleotide may be appropriate. Various formulations and devices for achieving sustained release are known in the art. In some embodiments, dosage is daily, every other day, every three days, every four days, every five days, or every six days. In some embodiments, dosing frequency is once every week, every 2 weeks, every 4 weeks, every 5 weeks, every 6 weeks, every 7 weeks, every 8 weeks, every 9 weeks, or every 10 weeks; or once every month, every 2 months, or every 3 months, or longer. The progress of this therapy is easily monitored by conventional techniques and assays.

[0233] The dosing regimen (including the polypeptide used) can vary over time. In some embodiments, for an adult subject of normal weight, doses ranging from about 0.01 to 1000 mg/kg may be administered. In some embodiments, the dose is between 1 to 200 mg. The particular dosage regimen, i.e., dose, timing and repetition, will depend on the particular subject and that subject's medical history, as well as the properties of the polypeptide or the polynucleotide (such as the half-life of the polypeptide or the polynucleotide, and other considerations well known in the art).

[0234] For the purpose of the present disclosure, the appropriate dosage of a therapeutic agent as described herein will depend on the specific agent (or compositions thereof) employed, the formulation and route of administration, the type and severity of the disease, whether the polypeptide or the polynucleotide is administered for preventive or therapeutic purposes, previous therapy, the subject's clinical history and response to the antagonist, and the discretion of the attending physician. Typically the clinician will administer a polypeptide until a dosage is reached that achieves the desired result.

[0235] Administration of one or more polypeptides or polynucleotides can be continuous or intermittent, depending, for example, upon the recipient's physiological condition, whether the purpose of the administration is therapeutic or prophylactic, and other factors known to skilled practitioners. The administration of a polypeptide may be essentially continuous over a preselected period of time or may be in a series of spaced dose, e.g., either before, during, or after developing a disease. As used herein, the term “treating” refers to the application or administration of a polypeptide or a polynucleotide or composition including the polypeptide or the polynucleotide to a subject in need thereof.

[0236] “A subject in need thereof”, refers to an individual who has a disease, a symptom of the disease, or a predisposition toward the disease, with the purpose to cure, heal, alleviate, relieve, alter, remedy, ameliorate, improve, or affect the disease, the symptom of the disease, or the predisposition toward the disease. In some embodiments, the subject has hypercholesterolemia. In some embodiments, the subject is a mammal. In some embodiments, the subject is a non-human primate. In some embodiments, the subject is human. Alleviating a disease includes delaying the development or progression of the disease, or reducing disease severity. Alleviating the disease does not necessarily require curative results.

[0237] As used therein, “delaying” the development of a disease means to defer, hinder, slow, retard, stabilize, and/or postpone progression of the disease. This delay can be of varying lengths of time, depending on the history of the disease and/or individuals being treated. A method that “delays” or alleviates the development of a disease, or delays the onset of the disease, is a method that reduces probability of developing one or more symptoms of the disease in a given time frame and/or reduces extent of the symptoms in a given time frame, when compared to not using the method. Such comparisons are typically based on clinical studies, using a number of subjects sufficient to give a statistically significant result.

[0238] “Development” or “progression” of a disease means initial manifestations and/or ensuing progression of the disease. Development of the disease can be detectable and assessed using standard clinical techniques as well known in the art. However, development also refers to progression that may be undetectable. For purpose of this disclosure, development or progression refers to the biological course of the symptoms. “Development” includes occurrence, recurrence, and onset.

[0239] As used herein “onset” or “occurrence” of a disease includes initial onset and/or recurrence. Conventional methods, known to those of ordinary skill in the art of medicine, can be used to administer the isolated polypeptide or pharmaceutical composition to the subject, depending upon the type of disease to be treated or the site of the disease. This composition can also be administered via other conventional routes, e.g., administered orally, parenterally, by inhalation spray, topically, rectally, nasally, buccally, vaginally or via an implanted reservoir.

[0240] The term “parenteral” as used herein includes subcutaneous, intracutaneous, intravenous, intramuscular, intraarticular, intraarterial, intrasynovial, intrasternal, intrathecal, intralesional, and intracranial injection or infusion techniques. In addition, it can be administered to the subject via injectable depot routes of administration such as using 1-, 3-, or 6-month depot injectable or biodegradable materials and methods.

### Host Cells and Organisms

[0241] Other aspects of the present disclosure provide host cells and organisms for the production and/or isolation of the nucleobase editors, e.g., for in vitro editing. Host cells are genetically engineered to express the nucleobase editors and components of the translation system described herein. In some embodiments, host cells comprise vectors encoding the nucleobase editors and components of the translation system (e.g., transformed, transduced, or transfected), which can be, for example, a cloning vector or an expression vector. The vector can be, for example, in the form of a plasmid, a bacterium, a virus, a naked polynucleotide, or a conjugated polynucleotide. The vectors are introduced into cells and/or microorganisms by standard methods including electroporation, infection by viral vectors, high velocity ballistic penetration by small particles with the nucleic acid either within the matrix of small beads or particles, or on the surface (Klein et al., Nature 327, 70-73 (1987)). In some embodiments, the host cell is a prokaryotic cell. In some embodiments, the host cell is a eukaryotic cell. In some embodiments, the host cell is a bacterial cell. In some embodiments, the host cell is a yeast cell. In some embodiments, the host cell is a mammalian cell. In some embodiments, the host cell is a human cell. In some embodiments, the host cell is a cultured cell. In some embodiments, the host cell is within a tissue or an organism.

[0242] The engineered host cells can be cultured in conventional nutrient media modified as appropriate for such activities as, for example, screening steps, activating promoters or selecting transformants. These cells can optionally be cultured into transgenic organisms.

[0243] Several well-known methods of introducing target nucleic acids into bacterial cells are available, any of which can be used in the present disclosure. These include: fusion of the recipient cells with bacterial protoplasts containing the DNA, electroporation, projectile bombardment, and infection with viral vectors (discussed further, below), etc. Bacterial cells can be used to amplify the number of plasmids containing DNA constructs of the present disclosure. The bacteria are grown to log phase and the plasmids within the bacteria can be isolated by a variety of methods known in the art (see, for instance, Sambrook). In addition, a plethora of kits are commercially available for the purification of plasmids from bacteria, (see, e.g., EasyPrep™ FlexiPrep™, both from Pharmacia Biotech; StrataClean™, from Stratagene; and, QIAprep™ from Qiagen). The isolated and purified plasmids are then further manipulated to produce other plasmids, used to transfect cells or incorporated into related vectors to infect organisms. Typical vectors contain transcription and translation terminators, transcription and translation initiation sequences, and promoters useful for regulation of the expression of the particular target nucleic acid. The vectors optionally comprise generic expression cassettes containing at least one independent terminator sequence, sequences permitting replication of the cassette in eukaryotes, or prokaryotes, or both, (e.g., shuttle vectors) and selection markers for both prokaryotic and eukaryotic systems. Vectors are suitable for replication and integration in prokaryotes, eukaryotes, or preferably both. See, Giliman & Smith, Gene 8:81 (1979); Roberts, et al., Nature, 328:731 (1987); and Schneider, B., et al., Protein Expr. Purifi 6435:10 (1995)).

[0244] Bacteriophages useful for cloning is provided, e.g., by the ATCC, e.g., The ATCC Catalogue of Bacteria and Bacteriophage (1992) Gherna et al. (eds) published by the ATCC. Additional basic procedures for sequencing, cloning and other aspects of molecular biology and underlying theoretical considerations are also found in Watson et al. (1992) Recombinant DNA Second Edition Scientific American Books, NY.

[0245] Other useful references, e.g. for cell isolation and culture (e.g., for subsequent nucleic acid isolation) include Freshney (1994) Culture of Animal Cells, a Manual of Basic Technique, third edition, Wiley-Liss, New York and the references cited therein; Payne et al. (1992) Plant Cell and Tissue Culture in Liquid Systems John Wiley & Sons, Inc. New York, N.Y.; Gamborg and Phillips (eds) (1995) Plant Cell. Tissue and Organ Culture; Fundamental Methods Springer Lab Manual, Springer-Verlag (Berlin Heidelberg New York) and Atlas and Parks (eds) The Handbook of Microbiological Media (1993) CRC Press, Boca Raton, Fla. In addition, essentially any nucleic acid (and virtually any labeled nucleic acid, whether standard or non-standard) can be custom or standard ordered from any of a variety of commercial sources, such as The Midland Certified Reagent Company (mcrc@oligos.com), The Great American Gene Company (www.genco.com), ExpressGen Inc. (www.expressgen.com), Operon Technologies Inc. (Alameda, Calif.), and many others.

[0246] Without further elaboration, it is believed that one skilled in the art can, based on the above description, utilize the present disclosure to its fullest extent. The following specific embodiments are, therefore, to be construed as merely illustrative, and not limitative of the remainder of the disclosure in any way whatsoever. All publications cited herein are incorporated by reference for the purposes or subject matter referenced herein.

### EXAMPLES

[0247] In order that the invention described herein may be more fully understood, the following examples are set forth. The synthetic examples described in this application are offered to illustrate the compounds and methods provided herein and are not to be construed in any way as limiting their scope.

### Example 1: Guide Nucleotide Sequence Programmable DNA-Binding Protein Domains, Deaminases, and Base Editors

[0248] Non-limiting examples of suitable guide nucleotide sequence-programmable DNA-binding protein domain s are provided. The disclosure provides Cas9 variants, for example, Cas9 proteins from one or more organisms, which may comprise one or more mutations (e.g., to generate dCas9 or Cas9 nickase). In some embodiments, one or more of the amino acid residues, identified below by an asterek, of a Cas9 protein may be mutated. In some embodiments, the D10 and/or H840 residues of the amino acid sequence provided in SEQ ID NO: 1, or a corresponding mutation in any of the amino acid sequences provided in SEQ ID NOs: 11-260, are mutated. In some embodiments, the D10 residue of the amino acid sequence provided in SEQ ID NO: 1, or a corresponding mutation in any of the amino acid sequences provided in SEQ ID NOs: 11-260, is mutated to any amino acid residue, except for D. In some embodiments, the D10 residue of the amino acid sequence provided in SEQ ID NO: 1, or a corresponding mutation in any of the amino acid sequences provided in SEQ ID NOs: 11-260, is mutated to an A. In some embodiments, the H840 residue of the amino acid sequence provided in SEQ ID NO: 1, or a corresponding residue in any of the amino acid sequences provided in SEQ ID NOs: 11-260, is an H. In some embodiments, the H840 residue of the amino acid sequence provided in SEQ ID NO: 1, or a corresponding mutation in any of the amino acid sequences provided in SEQ ID NOs: 11-260, is mutated to any amino acid residue, except for H. In some embodiments, the H840 residue of the amino acid sequence provided in SEQ ID NO: 1, or a corresponding mutation in any of the amino acid sequences provided in SEQ ID NOs: 11-260, is mutated to an A. In some embodiments, the D10 residue of the amino acid sequence provided in SEQ ID NO: 1, or a corresponding residue in any of the amino acid sequences provided in SEQ ID NOs: 11-260, is a D.

[0249] A number of Cas9 sequences from various species were aligned to determine whether corresponding homologous amino acid residues of D10 and H840 of SEQ ID NO: 1 or SEQ ID NO: 11 can be identified in other Cas9 proteins, allowing the generation of Cas9 variants with corresponding mutations of the homologous amino acid residues. The alignment was carried out using the NCBI Constraint-based Multiple Alignment Tool (COBALT (accessible at st-va.ncbi.nlm.nih.gov/tools/cobalt), with the following parameters. Alignment parameters: Gap penalties −11, −1; End-Gap penalties −5, −1. CDD Parameters: Use RPS BLAST on; Blast E-value 0.003; Find Conserved columns and Recompute on. Query Clustering Parameters: Use query clusters on; Word Size 4; Max cluster distance 0.8; Alphabet Regular.

[0250] An exemplary alignment of four Cas9 sequences is provided below. The Cas9 sequences in the alignment are: Sequence 1 (S1): SEQ ID NO: 11|WP_010922251|gi 499224711|type II CRISPR RNA-guided endonuclease Cas9 [Streptococcus pyogenes]; Sequence 2 (S2): SEQ ID NO: 12|WP_039695303|gi 746743737|type II CRISPR RNA-guided endonuclease Cas9 [Streptococcus gallolyticus]; Sequence 3 (S3): SEQ ID NO: 13|WP_045635197|gi 782887988|type II CRISPR RNA-guided endonuclease Cas9 [Streptococcus mitis]; Sequence 4 (S4): SEQ ID NO: 14|5AXW_A|gi 924443546|Staphylococcus Aureus Cas9. The HNH domain (bold and underlined) and the RuvC domain (boxed) are identified for each of the four sequences. Amino acid residues 10 and 840 in S1 and the homologous amino acids in the aligned sequences are identified with an asterisk following the respective amino acid residue.

| | | | |
|---|---|---|---|
| S1 | 1 | --MDKK-YSIGLD*IGTNSVGWAVITDEYKVPSKKFKVLGNTDRHSIKKNLI--GALLFDSG--ETAEATRLKRTARRRYT | 73 |
| S2 | 1 | --MTKKNYSIGLD*IGTNSVGWAVITDDYKVPAKKMKVLGNTDKKYIKKNLL--GALLFDSG--ETAEATRLKRTARRRYT | 74 |
| S3 | 1 | --M-KKGYSIGLD*IGTNSVGFAVITDDYKVPSKEMKVLGNTDKRFIKKNLI--GALLFDEG--TTAEARRLKRTARRRYT | 73 |
| S4 | 1 | GSHMKRNYILGLD*IGITSVGYGII--DYET-----------------RDVIDAGVRIFKEANVENNEGRRSKRGARRLKR | 61 |
| S1 | 74 | RRKNRICYLQEIFSNEMAKVDDSFFHRLEESFLVEEDKKHERHPIFGNIVDEVAYHEKYPTIYHLRKKLVDSTDKADLRL | 153 |
| S2 | 75 | RRKNRLRYLQEIFANEIAKVDESFFQRLDESFLTDDDKTEDSHPIFGNKAEEDAYHQKFPTIYHLRKHLADSSEKADLRL | 154 |
| S3 | 74 | RRKNRLRYLQEIFSEEMSKVDSSFFHRLDDSFLIPEDKRESKYPIFATLTEEKEYHKQFPTIYHLRKQLADSKEKTDLRL | 153 |
| S4 | 62 | RRRHRIQRVKKLL--------------FDYNLLTD--------------------HSELSGINPYEARVKGLSQKLSEEE | 107 |
| S1 | 154 | IYLALAHMIKERGHFLIEGDLNPDNSDVDKLFIQLVQTYNQLFEENPINASGVDAKAILSARLSKSRRLENLIAQLPGEK | 233 |
| S2 | 155 | VYLALAHMIKFRGHFLIEGELNAENTDVQKIFADFVGVYNRTFDDSHLSEITVDVASILTEKISKSRRLENLIKYYPTEK | 234 |
| S3 | 154 | IYLALAHMIKYRGHFLYEEAFDIKNNDIQKIFNEFISIYDNTFEGSSLSGQNAQVEAIFTDKISKSAKRERVLKLEPDEK | 233 |
| S4 | 108 | FSAALLHLAKRRG----------------------VHNVNEVEEDT---------------------------------- | 131 |
| S1 | 234 | KNGLFGNLIALSLGLTPNEKSNFDLAEDAKLQLSKDTYDDDLDNLLAQIGDQYADLFLAAKNLSDAILLSDILRVNTEIT | 313 |
| S2 | 235 | KNTLFGNLIALALGLQPNEKTNFKLSEDAKLQFSKDTYEEDLEELLGKIGDDYADLFTSAKNLYDAILLSGILTVDDNST | 314 |
| S3 | 234 | STGLFSEFLKLIVGNQADFKKHFDLEDKAPLQFSKDTYDEDLENLLGQIGDDFTDLFVSAKKLYDAILLSGILTVTDPST | 313 |
| S4 | 132 | -----GNELS------------------TKEQISRN-------------------------------------------- | 144 |
| S1 | 314 | KAPLSASMIKRYDEHHQDLTLLKALVRQQLPEKYKEIFFDQSKNGYAGYIDGGASQEEFYKFIKPILEKM--DGTEELLV | 391 |
| S2 | 315 | KAPLSASMIKRYVEHHEDLEKLKEFIKANKSELYHDIFKDKNKNGYAGYIENGVKQDEFYKYLKNILSKIKIDGSDYFLD | 394 |
| S3 | 314 | KAPLSASMIERYENHQNDLAALKQFIKNNLPEKYDEVFSDQSKDGYAGYIDGKTTQETFYKYIKNLLSKF--EGTDYFLD | 391 |
| S4 | 145 | ----SKALEEKYVAELQ-------------------------------------------------LERLKKDG------ | 165 |
| S1 | 392 | KLNREDLLRKQRTFDNGSIPHQIHLGELHAILRRQEDFYPFLKDNREKIEKILTFRIPYYVGPLARGNSRFAWMTRKSEE | 471 |
| S2 | 395 | KIEREDFLRKQRTFDNGSIPHQIHLQEMHAILRRQGDYYPFLKEKQDRIEKILTFRIPYYVGPLVRKDSRFAWAEYRSDE | 474 |
| S3 | 392 | KIEREDFLRKQRTFDNGSIPHQIHLQEMNAILRRQGEYYPFLKDNKEKIEKILTFRIPYYVGPLARGNRDFAWLTRNSDE | 471 |
| S4 | 166 | --EVRGSINRFKTSD--------YVKEAKQLLKVQKAYHQLDQSFIDTYIDLLETRRTYYEGP--GEGSPFGW------K | 227 |
| S1 | 472 | TITPWNFEEVVDKGASAQSFIERMTNFDKNLPNEKVLPKHSLLYEYFTVYNELTKVKYVTEGMRKPAFLSGEQKKAIVDL | 551 |
| S2 | 475 | KITPWNFDKVIDKEKSAEKFITRMTLNDLYLPEEKVLPKHSHVYETYAVYNELTKIKYVNEQGKE-SFFDSNMKQEIFDH | 553 |
| S3 | 472 | AIRPWNFEEIVDKASSAEDFINKMTNYDLYLPEEKVLPKHSLLYETFAVYNELTKVKFIAEGLRDYQFLDSGQKKQIVNQ | 551 |
| S4 | 228 | DIKEW---------------YEMLMGHCTYFPEELRSVKYAYNADLYNALNDLNNLVITRDENEK---LEYYEKFQIIEN | 289 |
| S1 | 552 | LEKTNRKVTVKQLKEDYFKKIECFDSVEISGVEDR---FNASLGTYHDLLKIIKDKDFLDNEENEDILEDIVLTLTLFED | 628 |
| S2 | 554 | VFKENRKVTKEKLLNYLNKEFPEYRIKDLIGLDKENKSFNASLGTYHDLKKIL-DKAFLDDKVNEEVIEDIIKTLTLFED | 632 |
| S3 | 552 | LEKENRKVTEKDIIHYLHN-VDGYDGIELKGIEKQ---FNASLSTYHDLLKIIKDKEEMDDAKNEAILENIVHTLTIFED | 627 |
| S4 | 290 | VFKQKKKPTLKQIAKEILVNEEDIKGYRVTSTGKPEF---TNLKVYHDIKDITARKEII---ENAELLDQIAKILTIYQS | 363 |
| S1 | 629 | REMIEERLKTYAHLFDDKVMKQLKR-RRYTGWGRLSRKLINGIRDKQSGKTILDFLKSDGFANRNFMQLIHDDSLTFKED | 707 |
| S2 | 633 | KDMIHERLQKYSDIFTANQLKKLER-RHYTGWGRLSYKLINGIRNKENNKTILDYLIDDGSANRNFMQLINDDTLPFKQI | 711 |
| S3 | 628 | REMIKQRLAQYDSLFDEKVIKALTR-RHYTGWGKLSAKLINGICDKQTGNTILDYLIDDGKINRNFMQLINDDGLSFKEI | 706 |
| S4 | 364 | SEDIQEELTNLNSELTQEEIEQISNLKGYTGTHNLSLKAINLILDE------LWHTNDNQIAIFNRLKLVP--------- | 428 |
| S1 | 708 | [chemical structure] | 781 |
| S2 | 712 | [chemical structure] | 784 |
| S3 | 707 | [chemical structure] | 779 |
| S4 | 429 | [chemical structure] | 505 |
| S1 | 782 | KRIEEGIKELGSQIL-------KEHPVENTQLQNEKLYLYYLQNGRDMYVDQELDINRLSD----YDVDH*IVPQSFLKDD | 850 |
| S2 | 785 | KKLQNSLKELGSNILNEEKPSYIEDKVENSHLQNDQLFLYYIQNGKDMYTGDELDIDHLSD----YDIDH*IIPQAFIKDD | 860 |
| S3 | 780 | KRIEDSLKILASGL---DSNILKENPTDNNQLQNDRLFLYYLQNGKDMYTGEALDINQLSS----YDIDH*IIPQAFIKDD | 852 |
| S4 | 506 | ERIEEIIRTTGK---------------ENAKYLIEKIKLHDMQEGKCLYSLEAIPLEDLLNNPFNYEVDH*IIPRSVSFDN | 570 |
| S1 | 851 | [chemical structure] | 922 |
| S2 | 861 | [chemical structure] | 932 |
| S3 | 853 | [chemical structure] | 924 |
| S4 | 571 | [chemical structure] | 650 |
| S1 | 923 | [chemical structure] | 1002 |
| S2 | 933 | [chemical structure] | 1012 |
| S3 | 925 | [chemical structure] | 1004 |
| S4 | 651 | [chemical structure] | 712 |
| S1 | 1003 | [chemical structure] | 1077 |
| S2 | 1013 | [chemical structure] | 1083 |
| S3 | 1005 | [chemical structure] | 1081 |
| S4 | 713 | [chemical structure] | 764 |
| S1 | 1078 | [chemical structure] | 1149 |
| S2 | 1084 | [chemical structure] | 1158 |
| S3 | 1082 | [chemical structure] | 1156 |
| S4 | 765 | [chemical structure] | 835 |
| S1 | 1150 | EKGKSKKLKSVKELLGITIMERSSFEKNPI-DFLEAKG------YKEVKKDLIIKLPKYSLFELENGRKRMLASAGELQKG | 1223 |
| S2 | 1159 | EKGKAKKLKTVKELVGISIMERSFFEENPV-EFLENKG------YHNIREDKLIKLPKYSLFEFEGGRRRLLASASELQKG | 1232 |
| S3 | 1157 | EKGKAKKLKTVKTLVGITIMEKAAFEENPI-TFLENKG------YHNVRKENILCLPKYSLFELENGRRRLLASAKELQKG | 1230 |
| S4 | 836 | DPQTYQKLK--------LIMEQYGDEKNPLYKYYEETGNYLTKYSKKDNGPVIKKIKYYGNKLNAHLDITDDYPNSRNKV | 907 |
| S1 | 1224 | NELALPSKYVNFLYLASHYEKLKGSPEDNEQKQLFVEQHKHYLDEIIEQISEFSKRVILADANLDKVLSAYNKH------ | 1297 |
| S2 | 1233 | NEMVLPGYLVELLYHAHRADNF-----NSTEYLNYVSEHKKEFEKVLSCVEDFANLYVDVEKNLSKIRAVADSM------ | 1301 |
| S3 | 1231 | NEIVLPVYLTTLLYHSKNVHKL-----DEPGHLEYIQKHRNEFKDLLNLVSEFSQKYVLADANLEKIKSLYADN------ | 1299 |
| S4 | 908 | VKLSLKPYRFD-VYLDNGVYKFV-----TVKNLDVIK--KENYYEVNSKAYEEAKKLKKISNQAEFIASFYNNDLIKING | 979 |
| S1 | 1298 | RDKPIREQAENIIHLFTLTNLGAPAAFKYFDTTIDRKRYTSTKEVLDATLIHQSIT--------GLYETRI----DLSQL | 1365 |
| S2 | 1302 | DNFSIEEISNSFINLLTLTALGAPADFNFLGEKIPRKRYTSTKECLNATLIHQSIT--------GLYETRI----DLSKL | 1369 |
| S3 | 1300 | EQADIEILANSFINLLTFTALGAPAAFKFFGKDIDRKRYTTVSEILNATLIHQSIT--------GLYETWI----DLSKL | 1367 |
| S4 | 980 | ELYRVIGVNNDLLNRIEVNMIDITYR-EYLENMNDKRPPRIIKTIASKT---QSIKKYSTDILGNLYEVKSKKHPQIIKK | 1055 |
| S1 | 1366 | GGD | 1368 |
| S2 | 1370 | GEE | 1372 |
| S3 | 1368 | GED | 1370 |
| S4 | 1056 | G-- | 1056 |

[0251] The alignment demonstrates that amino acid sequences and amino acid residues that are homologous to a reference Cas9 amino acid sequence or amino acid residue can be identified across Cas9 sequence variants, including, but not limited to Cas9 sequences from different species, by identifying the amino acid sequence or residue that aligns with the reference sequence or the reference residue using alignment programs and algorithms known in the art. This disclosure provides Cas9 variants in which one or more of the amino acid residues identified by an asterisk in SEQ ID NOs: 11-14 (e.g., 51, S2, S3, and S4, respectively) are mutated as described herein. The residues D10 and H840 in Cas9 of SEQ ID NO: 1 that correspond to the residues identified in SEQ ID NOs: 11-14 by an asterisk are referred to herein as “homologous” or “corresponding” residues. Such homologous residues can be identified by sequence alignment, e.g., as described above, and by identifying the sequence or residue that aligns with the reference sequence or residue. Similarly, mutations in Cas9 sequences that correspond to mutations identified in SEQ ID NO: 1 herein, e.g., mutations of residues 10, and 840 in SEQ ID NO: 1, are referred to herein as “homologous” or “corresponding” mutations. For example, the mutations corresponding to the D10A mutation in SEQ ID NO: 1 or 51 (SEQ ID NO: 11) for the four aligned sequences above are D11A for S2, D10A for S3, and D13A for S4; the corresponding mutations for H840A in SEQ ID NO: 1 or 51 (SEQ ID NO: 11) are H850A for S2, H842A for S3, and H560A for S4.

[0252] A total of 250 Cas9 sequences (SEQ ID NOs: 11-260) from different species are provided. Amino acid residues homologous to residues 10, and 840 of SEQ ID NO: 1 may be identified in the same manner as outlined above. All of these Cas9 sequences may be used in accordance with the present disclosure.

| | | |
|---|---|---|
| WP_010922251.1 | type II CRISPR RNA-guided endonuclease Cas9 [Streptococcus pyogenes] | SEQ ID NO: 11 |
| WP_039695303.1 | type II CRISPR RNA-guided endonuclease Cas9 [Streptococcus gallolyticus] | SEQ ID NO: 12 |
| WP_045635197.1 | type II CRISPR RNA-guided endonuclease Cas9 [Streptococcus mitis] | SEQ ID NO: 13 |
| 5AXW_A | Cas9, Chain A, Crystal Structure [Staphylococcus Aureus] | SEQ ID NO: 14 |
| WP_009880683.1 | type II CRISPR RNA-guided endonuclease Cas9 [Streptococcus pyogenes] | SEQ ID NO: 15 |
| WP_010922251.1 | type II CRISPR RNA-guided endonuclease Cas9 [Streptococcus pyogenes] | SEQ ID NO: 16 |
| WP_011054416.1 | type II CRISPR RNA-guided endonuclease Cas9 [Streptococcus pyogenes] | SEQ ID NO: 17 |
| WP_011284745.1 | type II CRISPR RNA-guided endonuclease Cas9 [Streptococcus pyogenes] | SEQ ID NO: 18 |
| WP_011285506.1 | type II CRISPR RNA-guided endonuclease Cas9 [Streptococcus pyogenes] | SEQ ID NO: 19 |
| WP_011527619.1 | type II CRISPR RNA-guided endonuclease Cas9 [Streptococcus pyogenes] | SEQ ID NO: 20 |
| WP_012560673.1 | type II CRISPR RNA-guided endonuclease Cas9 [Streptococcus pyogenes] | SEQ ID NO: 21 |
| WP_014407541.1 | type II CRISPR RNA-guided endonuclease Cas9 [Streptococcus pyogenes] | SEQ ID NO: 22 |
| WP_020905136.1 | type II CRISPR RNA-guided endonuclease Cas9 [Streptococcus pyogenes] | SEQ ID NO: 23 |
| WP_023080005.1 | type II CRISPR RNA-guided endonuclease Cas9 [Streptococcus pyogenes] | SEQ ID NO: 24 |
| WP_023610282.1 | type II CRISPR RNA-guided endonuclease Cas9 [Streptococcus pyogenes] | SEQ ID NO: 25 |
| WP_030125963.1 | type II CRISPR RNA-guided endonuclease Cas9 [Streptococcus pyogenes] | SEQ ID NO: 26 |
| WP_030126706.1 | type II CRISPR RNA-guided endonuclease Cas9 [Streptococcus pyogenes] | SEQ ID NO: 27 |
| WP_031488318.1 | type II CRISPR RNA-guided endonuclease Cas9 [Streptococcus pyogenes] | SEQ ID NO: 28 |
| WP_032460140.1 | type II CRISPR RNA-guided endonuclease Cas9 [Streptococcus pyogenes] | SEQ ID NO: 29 |
| WP_032461047.1 | type II CRISPR RNA-guided endonuclease Cas9 [Streptococcus pyogenes] | SEQ ID NO: 30 |
| WP_032462016.1 | type II CRISPR RNA-guided endonuclease Cas9 [Streptococcus pyogenes] | SEQ ID NO: 31 |
| WP_032462936.1 | type II CRISPR RNA-guided endonuclease Cas9 [Streptococcus pyogenes] | SEQ ID NO: 32 |
| WP_032464890.1 | type II CRISPR RNA-guided endonuclease Cas9 [Streptococcus pyogenes] | SEQ ID NO: 33 |
| WP_033888930.1 | type II CRISPR RNA-guided endonuclease Cas9 [Streptococcus pyogenes] | SEQ ID NO: 34 |
| WP_038431314.1 | type II CRISPR RNA-guided endonuclease Cas9 [Streptococcus pyogenes] | SEQ ID NO: 35 |
| WP_038432938.1 | type II CRISPR RNA-guided endonuclease Cas9 [Streptococcus pyogenes] | SEQ ID NO: 36 |
| WP_038434062.1 | type II CRISPR RNA-guided endonuclease Cas9 [Streptococcus pyogenes] | SEQ ID NO: 37 |
| BAQ51233.1 | CRISPR-associated protein, Csn1 family [Streptococcus pyogenes] | SEQ ID NO: 38 |
| KGE60162.1 | hypothetical protein MGAS2111_0903 [Streptococcus pyogenes MGAS2111] | SEQ ID NO: 39 |
| KGE60856.1 | CRISPR-associated endonuclease protein [Streptococcus pyogenes SS1447] | SEQ ID NO: 40 |
| WP_002989955.1 | MULTISPECIES: type II CRISPR RNA-guided endonuclease Cas9 [Streptococcus] | SEQ ID NO: 41 |
| WP_003030002.1 | MULTISPECIES: type II CRISPR RNA-guided endonuclease Cas9 [Streptococcus] | SEQ ID NO: 42 |
| WP_003065552.1 | MULTISPECIES: type II CRISPR RNA-guided endonuclease Cas9 [Streptococcus] | SEQ ID NO: 43 |
| WP_001040076.1 | type II CRISPR RNA-guided endonuclease Cas9 [Streptococcus agalactiae] | SEQ ID NO: 44 |
| WP_001040078.1 | type II CRISPR RNA-guided endonuclease Cas9 [Streptococcus agalactiae] | SEQ ID NO: 45 |
| WP_001040080.1 | type II CRISPR RNA-guided endonuclease Cas9 [Streptococcus agalactiae] | SEQ ID NO: 46 |
| WP_001040081.1 | type II CRISPR RNA-guided endonuclease Cas9 [Streptococcus agalactiae] | SEQ ID NO: 47 |
| WP_001040083.1 | type II CRISPR RNA-guided endonuclease Cas9 [Streptococcus agalactiae] | SEQ ID NO: 48 |
| WP_001040085.1 | type II CRISPR RNA-guided endonuclease Cas9 [Streptococcus agalactiae] | SEQ ID NO: 49 |
| WP_001040087.1 | type II CRISPR RNA-guided endonuclease Cas9 [Streptococcus agalactiae] | SEQ ID NO: 50 |
| WP_001040088.1 | type II CRISPR RNA-guided endonuclease Cas9 [Streptococcus agalactiae] | SEQ ID NO: 51 |
| WP_001040089.1 | type II CRISPR RNA-guided endonuclease Cas9 [Streptococcus agalactiae] | SEQ ID NO: 52 |
| WP_001040090.1 | type II CRISPR RNA-guided endonuclease Cas9 [Streptococcus agalactiae] | SEQ ID NO: 53 |
| WP_001040091.1 | type II CRISPR RNA-guided endonuclease Cas9 [Streptococcus agalactiae] | SEQ ID NO: 54 |
| WP_001040092.1 | type II CRISPR RNA-guided endonuclease Cas9 [Streptococcus agalactiae] | SEQ ID NO: 55 |
| WP_001040094.1 | type II CRISPR RNA-guided endonuclease Cas9 [Streptococcus agalactiae] | SEQ ID NO: 56 |
| WP_001040095.1 | type II CRISPR RNA-guided endonuclease Cas9 [Streptococcus agalactiae] | SEQ ID NO: 57 |
| WP_001040096.1 | type II CRISPR RNA-guided endonuclease Cas9 [Streptococcus agalactiae] | SEQ ID NO: 58 |
| WP_001040097.1 | type II CRISPR RNA-guided endonuclease Cas9 [Streptococcus agalactiae] | SEQ ID NO: 59 |
| WP_001040098.1 | type II CRISPR RNA-guided endonuclease Cas9 [Streptococcus agalactiae] | SEQ ID NO: 60 |
| WP_001040099.1 | type II CRISPR RNA-guided endonuclease Cas9 [Streptococcus agalactiae] | SEQ ID NO: 61 |
| WP_001040100.1 | type II CRISPR RNA-guided endonuclease Cas9 [Streptococcus agalactiae] | SEQ ID NO: 62 |
| WP_001040104.1 | type II CRISPR RNA-guided endonuclease Cas9 [Streptococcus agalactiae] | SEQ ID NO: 63 |
| WP_001040105.1 | type II CRISPR RNA-guided endonuclease Cas9 [Streptococcus agalactiae] | SEQ ID NO: 64 |
| WP_001040106.1 | type II CRISPR RNA-guided endonuclease Cas9 [Streptococcus agalactiae] | SEQ ID NO: 65 |
| WP_001040107.1 | type II CRISPR RNA-guided endonuclease Cas9 [Streptococcus agalactiae] | SEQ ID NO: 66 |
| WP_001040108.1 | type II CRISPR RNA-guided endonuclease Cas9 [Streptococcus agalactiae] | SEQ ID NO: 67 |
| WP_001040109.1 | type II CRISPR RNA-guided endonuclease Cas9 [Streptococcus agalactiae] | SEQ ID NO: 68 |
| WP_001040110.1 | type II CRISPR RNA-guided endonuclease Cas9 [Streptococcus agalactiae] | SEQ ID NO: 69 |
| WP_015058523.1 | type II CRISPR RNA-guided endonuclease Cas9 [Streptococcus agalactiae] | SEQ ID NO: 70 |
| WP_017643650.1 | type II CRISPR RNA-guided endonuclease Cas9 [Streptococcus agalactiae] | SEQ ID NO: 71 |
| WP_017647151.1 | type II CRISPR RNA-guided endonuclease Cas9 [Streptococcus agalactiae] | SEQ ID NO: 72 |
| WP_017648376.1 | type II CRISPR RNA-guided endonuclease Cas9 [Streptococcus agalactiae] | SEQ ID NO: 73 |
| WP_017649527.1 | type II CRISPR RNA-guided endonuclease Cas9 [Streptococcus agalactiae] | SEQ ID NO: 74 |
| WP_017771611.1 | type II CRISPR RNA-guided endonuclease Cas9 [Streptococcus agalactiae] | SEQ ID NO: 75 |
| WP_017771984.1 | type II CRISPR RNA-guided endonuclease Cas9 [Streptococcus agalactiae] | SEQ ID NO: 76 |
| CFQ25032.1 | CRISPR-associated protein [Streptococcus agalactiae] | SEQ ID NO: 77 |
| CFV16040.1 | CRISPR-associated protein [Streptococcus agalactiae] | SEQ ID NO: 78 |
| KLJ37842.1 | CRISPR-associated protein Csn1 [Streptococcus agalactiae] | SEQ ID NO: 79 |
| KLJ72361.1 | CRISPR-associated protein Csn1 [Streptococcus agalactiae] | SEQ ID NO: 80 |
| KLL20707.1 | CRISPR-associated protein Csn1 [Streptococcus agalactiae] | SEQ ID NO: 81 |
| KLL42645.1 | CRISPR-associated protein Csn1 [Streptococcus agalactiae] | SEQ ID NO: 82 |
| WP_047207273.1 | type II CRISPR RNA-guided endonuclease Cas9 [Streptococcus agalactiae] | SEQ ID NO: 83 |
| WP_047209694.1 | type II CRISPR RNA-guided endonuclease Cas9 [Streptococcus agalactiae] | SEQ ID NO: 84 |
| WP_050198062.1 | type II CRISPR RNA-guided endonuclease Cas9 [Streptococcus agalactiae] | SEQ ID NO: 85 |
| WP_050201642.1 | type II CRISPR RNA-guided endonuclease Cas9 [Streptococcus agalactiae] | SEQ ID NO: 86 |
| WP_050204027.1 | type II CRISPR RNA-guided endonuclease Cas9 [Streptococcus agalactiae] | SEQ ID NO: 87 |
| WP_050881965.1 | type II CRISPR RNA-guided endonuclease Cas9 [Streptococcus agalactiae] | SEQ ID NO: 88 |
| WP_050886065.1 | type II CRISPR RNA-guided endonuclease Cas9 [Streptococcus agalactiae] | SEQ ID NO: 89 |
| AHN30376.1 | CRISPR-associated protein Csn1 [Streptococcus agalactiae 138P] | SEQ ID NO: 90 |
| EAO78426.1 | reticulocyte binding protein [Streptococcus agalactiae H36B] | SEQ ID NO: 91 |
| CCW42055.1 | CRISPR-associated protein, SAG0894 family [Streptococcus agalactiae ILRI112] | SEQ ID NO: 92 |
| WP_003041502.1 | type II CRISPR RNA-guided endonuclease Cas9 [Streptococcus anginosus] | SEQ ID NO: 93 |
| WP_037593752.1 | type II CRISPR RNA-guided endonuclease Cas9 [Streptococcus anginosus] | SEQ ID NO: 94 |
| WP_049516684.1 | CRISPR-associated protein Csn1 [Streptococcus anginosus] | SEQ ID NO: 95 |
| GAD46167.1 | hypothetical protein ANG6_0662 [Streptococcus anginosus T5] | SEQ ID NO: 96 |
| WP_018363470.1 | type II CRISPR RNA-guided endonuclease Cas9 [Streptococcus caballi] | SEQ ID NO: 97 |
| WP_003043819.1 | type II CRISPR RNA-guided endonuclease Cas9 [Streptococcus canis] | SEQ ID NO: 98 |
| WP_006269658.1 | type II CRISPR RNA-guided endonuclease Cas9 [Streptococcus constellatus] | SEQ ID NO: 99 |
| WP_048800889.1 | type II CRISPR RNA-guided endonuclease Cas9 [Streptococcus constellatus] | SEQ ID NO: 100 |
| WP_012767106.1 | type II CRISPR RNA-guided endonuclease Cas9 [Streptococcus dysgalactiae] | SEQ ID NO: 101 |
| WP_014612333.1 | type II CRISPR RNA-guided endonuclease Cas9 [Streptococcus dysgalactiae] | SEQ ID NO: 102 |
| WP_015017095.1 | type II CRISPR RNA-guided endonuclease Cas9 [Streptococcus dysgalactiae] | SEQ ID NO: 103 |
| WP_015057649.1 | type II CRISPR RNA-guided endonuclease Cas9 [Streptococcus dysgalactiae] | SEQ ID NO: 104 |
| WP_048327215.1 | type II CRISPR RNA-guided endonuclease Cas9 [Streptococcus dysgalactiae] | SEQ ID NO: 105 |
| WP_049519324.1 | CRISPR-associated protein Csn1 [Streptococcus dysgalactiae] | SEQ ID NO: 106 |
| WP_012515931.1 | type II CRISPR RNA-guided endonuclease Cas9 [Streptococcus equi] | SEQ ID NO: 107 |
| WP_021320964.1 | type II CRISPR RNA-guided endonuclease Cas9 [Streptococcus equi] | SEQ ID NO: 108 |
| WP_037581760.1 | type II CRISPR RNA-guided endonuclease Cas9 [Streptococcus equi] | SEQ ID NO: 109 |
| WP_004232481.1 | type II CRISPR RNA-guided endonuclease Cas9 [Streptococcus equinus] | SEQ ID NO: 110 |
| WP_009854540.1 | type II CRISPR RNA-guided endonuclease Cas9 [Streptococcus gallolyticus] | SEQ ID NO: 111 |
| WP_012962174.1 | type II CRISPR RNA-guided endonuclease Cas9 [Streptococcus gallolyticus] | SEQ ID NO: 112 |
| WP_039695303.1 | type II CRISPR RNA-guided endonuclease Cas9 [Streptococcus gallolyticus] | SEQ ID NO: 113 |
| WP_014334983.1 | type II CRISPR RNA-guided endonuclease Cas9 [Streptococcus infantarius] | SEQ ID NO: 114 |
| WP_003099269.1 | type II CRISPR RNA-guided endonuclease Cas9 [Streptococcus iniae] | SEQ ID NO: 115 |
| AHY15608.1 | CRISPR-associated protein Csn1 [Streptococcus iniae] | SEQ ID NO: 116 |
| AHY17476.1 | CRISPR-associated protein Csn1 [Streptococcus iniae] | SEQ ID NO: 117 |
| ESR09100.1 | hypothetical protein IUSA1_08595 [Streptococcus iniae IUSA1] | SEQ ID NO: 118 |
| AGM98575.1 | CRISPR-associated protein Cas9/Csn1, subtype II/NMEMI [Streptococcus iniae SF1] | SEQ ID NO: 119 |
| ALF27331.1 | CRISPR-associated protein Csn1 [Streptococcus intermedius] | SEQ ID NO: 120 |
| WP_018372492.1 | type II CRISPR RNA-guided endonuclease Cas9 [Streptococcus massiliensis] | SEQ ID NO: 121 |
| WP_045618028.1 | type II CRISPR RNA-guided endonuclease Cas9 [Streptococcus mitis] | SEQ ID NO: 122 |
| WP_045635197.1 | type II CRISPR RNA-guided endonuclease Cas9 [Streptococcus mitis] | SEQ ID NO: 123 |
| WP_002263549.1 | type II CRISPR RNA-guided endonuclease Cas9 [Streptococcus mutans] | SEQ ID NO: 124 |
| WP_002263887.1 | type II CRISPR RNA-guided endonuclease Cas9 [Streptococcus mutans] | SEQ ID NO: 125 |
| WP_002264920.1 | type II CRISPR RNA-guided endonuclease Cas9 [Streptococcus mutans] | SEQ ID NO: 126 |
| WP_002269043.1 | type II CRISPR RNA-guided endonuclease Cas9 [Streptococcus mutans] | SEQ ID NO: 127 |
| WP_002269448.1 | type II CRISPR RNA-guided endonuclease Cas9 [Streptococcus mutans] | SEQ ID NO: 128 |
| WP_002271977.1 | type II CRISPR RNA-guided endonuclease Cas9 [Streptococcus mutans] | SEQ ID NO: 129 |
| WP_002272766.1 | type II CRISPR RNA-guided endonuclease Cas9 [Streptococcus mutans] | SEQ ID NO: 130 |
| WP_002273241.1 | type II CRISPR RNA-guided endonuclease Cas9 [Streptococcus mutans] | SEQ ID NO: 131 |
| WP_002275430.1 | type II CRISPR RNA-guided endonuclease Cas9 [Streptococcus mutans] | SEQ ID NO: 132 |
| WP_002276448.1 | type II CRISPR RNA-guided endonuclease Cas9 [Streptococcus mutans] | SEQ ID NO: 133 |
| WP_002277050.1 | type II CRISPR RNA-guided endonuclease Cas9 [Streptococcus mutans] | SEQ ID NO: 134 |
| WP_002277364.1 | type II CRISPR RNA-guided endonuclease Cas9 [Streptococcus mutans] | SEQ ID NO: 135 |
| WP_002279025.1 | type II CRISPR RNA-guided endonuclease Cas9 [Streptococcus mutans] | SEQ ID NO: 136 |
| WP_002279859.1 | type II CRISPR RNA-guided endonuclease Cas9 [Streptococcus mutans] | SEQ ID NO: 137 |
| WP_002280230.1 | type II CRISPR RNA-guided endonuclease Cas9 [Streptococcus mutans] | SEQ ID NO: 138 |
| WP_002281696.1 | type II CRISPR RNA-guided endonuclease Cas9 [Streptococcus mutans] | SEQ ID NO: 139 |
| WP_002282247.1 | type II CRISPR RNA-guided endonuclease Cas9 [Streptococcus mutans] | SEQ ID NO: 140 |
| WP_002282906.1 | type II CRISPR RNA-guided endonuclease Cas9 [Streptococcus mutans] | SEQ ID NO: 141 |
| WP_002283846.1 | type II CRISPR RNA-guided endonuclease Cas9 [Streptococcus mutans] | SEQ ID NO: 142 |
| WP_002287255.1 | type II CRISPR RNA-guided endonuclease Cas9 [Streptococcus mutans] | SEQ ID NO: 143 |
| WP_002288990.1 | type II CRISPR RNA-guided endonuclease Cas9 [Streptococcus mutans] | SEQ ID NO: 144 |
| WP_002289641.1 | type II CRISPR RNA-guided endonuclease Cas9 [Streptococcus mutans] | SEQ ID NO: 145 |
| WP_002290427.1 | type II CRISPR RNA-guided endonuclease Cas9 [Streptococcus mutans] | SEQ ID NO: 146 |
| WP_002295753.1 | type II CRISPR RNA-guided endonuclease Cas9 [Streptococcus mutans] | SEQ ID NO: 147 |
| WP_002296423.1 | type II CRISPR RNA-guided endonuclease Cas9 [Streptococcus mutans] | SEQ ID NO: 148 |
| WP_002304487.1 | type II CRISPR RNA-guided endonuclease Cas9 [Streptococcus mutans] | SEQ ID NO: 149 |
| WP_002305844.1 | type II CRISPR RNA-guided endonuclease Cas9 [Streptococcus mutans] | SEQ ID NO: 150 |
| WP_002307203.1 | type II CRISPR RNA-guided endonuclease Cas9 [Streptococcus mutans] | SEQ ID NO: 151 |
| WP_002310390.1 | type II CRISPR RNA-guided endonuclease Cas9 [Streptococcus mutans] | SEQ ID NO: 152 |
| WP_002352408.1 | type II CRISPR RNA-guided endonuclease Cas9 [Streptococcus mutans] | SEQ ID NO: 153 |
| WP_012997688.1 | type II CRISPR RNA-guided endonuclease Cas9 [Streptococcus mutans] | SEQ ID NO: 154 |
| WP_014677909.1 | type II CRISPR RNA-guided endonuclease Cas9 [Streptococcus mutans] | SEQ ID NO: 155 |
| WP_019312892.1 | type II CRISPR RNA-guided endonuclease Cas9 [Streptococcus mutans] | SEQ ID NO: 156 |
| WP_019313659.1 | type II CRISPR RNA-guided endonuclease Cas9 [Streptococcus mutans] | SEQ ID NO: 157 |
| WP_019314093.1 | type II CRISPR RNA-guided endonuclease Cas9 [Streptococcus mutans] | SEQ ID NO: 158 |
| WP_019315370.1 | type II CRISPR RNA-guided endonuclease Cas9 [Streptococcus mutans] | SEQ ID NO: 159 |
| WP_019803776.1 | type II CRISPR RNA-guided endonuclease Cas9 [Streptococcus mutans] | SEQ ID NO: 160 |
| WP_019805234.1 | type II CRISPR RNA-guided endonuclease Cas9 [Streptococcus mutans] | SEQ ID NO: 161 |
| WP_024783594.1 | type II CRISPR RNA-guided endonuclease Cas9 [Streptococcus mutans] | SEQ ID NO: 162 |
| WP_024784288.1 | type II CRISPR RNA-guided endonuclease Cas9 [Streptococcus mutans] | SEQ ID NO: 163 |
| WP_024784666.1 | type II CRISPR RNA-guided endonuclease Cas9 [Streptococcus mutans] | SEQ ID NO: 164 |
| WP_024784894.1 | type II CRISPR RNA-guided endonuclease Cas9 [Streptococcus mutans] | SEQ ID NO: 165 |
| WP_024786433.1 | type II CRISPR RNA-guided endonuclease Cas9 [Streptococcus mutans] | SEQ ID NO: 166 |
| WP_049473442.1 | CRISPR-associated protein Csn1 [Streptococcus mutans] | SEQ ID NO: 167 |
| WP_049474547.1 | CRISPR-associated protein Csn1 [Streptococcus mutans] | SEQ ID NO: 168 |
| EMC03581.1 | hypothetical protein SMU69_09359 [Streptococcus mutans NLML4] | SEQ ID NO: 169 |
| WP_000428612.1 | type II CRISPR RNA-guided endonuclease Cas9 [Streptococcus oralis] | SEQ ID NO: 170 |
| WP_000428613.1 | type II CRISPR RNA-guided endonuclease Cas9 [Streptococcus oralis] | SEQ ID NO: 171 |
| WP_049523028.1 | CRISPR-associated protein Csn1 [Streptococcus parasanguinis] | SEQ ID NO: 172 |
| WP_003107102.1 | type II CRISPR RNA-guided endonuclease Cas9 [Streptococcus parauberis] | SEQ ID NO: 173 |
| WP_054279288.1 | type II CRISPR RNA-guided endonuclease Cas9 [Streptococcus phocae] | SEQ ID NO: 174 |
| WP_049531101.1 | CRISPR-associated protein Csn1 [Streptococcus pseudopneumoniae] | SEQ ID NO: 175 |
| WP_049538452.1 | CRISPR-associated protein Csn1 [Streptococcus pseudopneumoniae] | SEQ ID NO: 176 |
| WP_049549711.1 | CRISPR-associated protein Csn1 [Streptococcus pseudopneumoniae] | SEQ ID NO: 177 |
| WP_007896501.1 | type II CRISPR RNA-guided endonuclease Cas9 [Streptococcus pseudoporcinus] | SEQ ID NO: 178 |
| EFR44625.1 | CRISPR-associated protein, Csn1 family [Streptococcus pseudoporcinus SPIN 20026] | SEQ ID NO: 179 |
| WP_002897477.1 | type II CRISPR RNA-guided endonuclease Cas9 [Streptococcus sanguinis] | SEQ ID NO: 180 |
| WP_002906454.1 | type II CRISPR RNA-guided endonuclease Cas9 [Streptococcus sanguinis] | SEQ ID NO: 181 |
| WP_009729476.1 | type II CRISPR RNA-guided endonuclease Cas9 [Streptococcus sp. F0441] | SEQ ID NO: 182 |
| CQR24647.1 | CRISPR-associated protein [Streptococcus sp. FF10] | SEQ ID NO: 183 |
| WP_000066813.1 | type II CRISPR RNA-guided endonuclease Cas9 [Streptococcus sp. M334] | SEQ ID NO: 184 |
| WP_009754323.1 | type II CRISPR RNA-guided endonuclease Cas9 [Streptococcus sp. taxon 056] | SEQ ID NO: 185 |
| WP_044674937.1 | type II CRISPR RNA-guided endonuclease Cas9 [Streptococcus suis] | SEQ ID NO: 186 |
| WP_044676715.1 | type II CRISPR RNA-guided endonuclease Cas9 [Streptococcus suis] | SEQ ID NO: 187 |
| WP_044680361.1 | type II CRISPR RNA-guided endonuclease Cas9 [Streptococcus suis] | SEQ ID NO: 188 |
| WP_044681799.1 | type II CRISPR RNA-guided endonuclease Cas9 [Streptococcus suis] | SEQ ID NO: 189 |
| WP_049533112.1 | CRISPR-associated protein Csn1 [Streptococcus suis] | SEQ ID NO: 190 |
| WP_029090905.1 | type II CRISPR RNA-guided endonuclease Cas9 [Brochothrix thermosphacta] | SEQ ID NO: 191 |
| WP_006506696.1 | type II CRISPR RNA-guided endonuclease Cas9 [Catenibacterium mitsuokai] | SEQ ID NO: 192 |
| AIT42264.1 | Cas9hc:NLS:HA [Cloning vector pYB196] | SEQ ID NO: 193 |
| WP_034440723.1 | type II CRISPR endonuclease Cas9 [Clostridiales bacterium S5-A11] | SEQ ID NO: 194 |
| AKQ21048.1 | Cas9 [CRISPR-mediated gene targeting vector p(bhsp68-Cas9)] | SEQ ID NO: 195 |
| WP_004636532.1 | type II CRISPR RNA-guided endonuclease Cas9 [Dolosigranulum pigrum] | SEQ ID NO: 196 |
| WP_002364836.1 | MULTISPECIES: type II CRISPR RNA-guided endonuclease Cas9 [Enterococcus] | SEQ ID NO: 197 |
| WP_016631044.1 | MULTISPECIES: type II CRISPR RNA-guided endonuclease Cas9 [Enterococcus] | SEQ ID NO: 198 |
| EMS75795.1 | hypothetical protein H318_06676 [Enterococcus durans IPLA 655] | SEQ ID NO: 199 |
| WP_002373311.1 | type II CRISPR RNA-guided endonuclease Cas9 [Enterococcus faecalis] | SEQ ID NO: 200 |
| WP_002378009.1 | type II CRISPR RNA-guided endonuclease Cas9 [Enterococcus faecalis] | SEQ ID NO: 201 |
| WP_002407324.1 | type II CRISPR RNA-guided endonuclease Cas9 [Enterococcus faecalis] | SEQ ID NO: 202 |
| WP_002413717.1 | type II CRISPR RNA-guided endonuclease Cas9 [Enterococcus faecalis] | SEQ ID NO: 203 |
| WP_010775580.1 | type II CRISPR RNA-guided endonuclease Cas9 [Enterococcus faecalis] | SEQ ID NO: 204 |
| WP_010818269.1 | type II CRISPR RNA-guided endonuclease Cas9 [Enterococcus faecalis] | SEQ ID NO: 205 |
| WP_010824395.1 | type II CRISPR RNA-guided endonuclease Cas9 [Enterococcus faecalis] | SEQ ID NO: 206 |
| WP_016622645.1 | type II CRISPR RNA-guided endonuclease Cas9 [Enterococcus faecalis] | SEQ ID NO: 207 |
| WP_033624816.1 | type II CRISPR RNA-guided endonuclease Cas9 [Enterococcus faecalis] | SEQ ID NO: 208 |
| WP_033625576.1 | type II CRISPR RNA-guided endonuclease Cas9 [Enterococcus faecalis] | SEQ ID NO: 209 |
| WP_033789179.1 | type II CRISPR RNA-guided endonuclease Cas9 [Enterococcus faecalis] | SEQ ID NO: 210 |
| WP_002310644.1 | type II CRISPR RNA-guided endonuclease Cas9 [Enterococcus faecium] | SEQ ID NO: 211 |
| WP_002312694.1 | type II CRISPR RNA-guided endonuclease Cas9 [Enterococcus faecium] | SEQ ID NO: 212 |
| WP_002314015.1 | type II CRISPR RNA-guided endonuclease Cas9 [Enterococcus faecium] | SEQ ID NO: 213 |
| WP_002320716.1 | type II CRISPR RNA-guided endonuclease Cas9 [Enterococcus faecium] | SEQ ID NO: 214 |
| WP_002330729.1 | type II CRISPR RNA-guided endonuclease Cas9 [Enterococcus faecium] | SEQ ID NO: 215 |
| WP_002335161.1 | type II CRISPR RNA-guided endonuclease Cas9 [Enterococcus faecium] | SEQ ID NO: 216 |
| WP_002345439.1 | type II CRISPR RNA-guided endonuclease Cas9 [Enterococcus faecium] | SEQ ID NO: 217 |
| WP_034867970.1 | type II CRISPR RNA-guided endonuclease Cas9 [Enterococcus faecium] | SEQ ID NO: 218 |
| WP_047937432.1 | type II CRISPR RNA-guided endonuclease Cas9 [Enterococcus faecium] | SEQ ID NO: 219 |
| WP_010720994.1 | type II CRISPR RNA-guided endonuclease Cas9 [Enterococcus hirae] | SEQ ID NO: 220 |
| WP_010737004.1 | type II CRISPR RNA-guided endonuclease Cas9 [Enterococcus hirae] | SEQ ID NO: 221 |
| WP_034700478.1 | type II CRISPR RNA-guided endonuclease Cas9 [Enterococcus hirae] | SEQ ID NO: 222 |
| WP_007209003.1 | type II CRISPR RNA-guided endonuclease Cas9 [Enterococcus italicus] | SEQ ID NO: 223 |
| WP_023519017.1 | type II CRISPR RNA-guided endonuclease Cas9 [Enterococcus mundtii] | SEQ ID NO: 224 |
| WP_010770040.1 | type II CRISPR RNA-guided endonuclease Cas9 [Enterococcus phoeniculicola] | SEQ ID NO: 225 |
| WP_048604708.1 | type II CRISPR RNA-guided endonuclease Cas9 [Enterococcus sp. AM1] | SEQ ID NO: 226 |
| WP_010750235.1 | type II CRISPR RNA-guided endonuclease Cas9 [Enterococcus villorum] | SEQ ID NO: 227 |
| AII16583.1 | Cas9 endonuclease [Expression vector pCas9] | SEQ ID NO: 228 |
| WP_029073316.1 | type II CRISPR RNA-guided endonuclease Cas9 [Kandleria vitulina] | SEQ ID NO: 229 |
| WP_031589969.1 | type II CRISPR RNA-guided endonuclease Cas9 [Kandleria vitulina] | SEQ ID NO: 230 |
| KDA45870.1 | CRISPR-associated protein Cas9/Csn1, subtype II/NMEMI [Lactobacillus animalis] | SEQ ID NO: 231 |
| WP_039099354.1 | type II CRISPR RNA-guided endonuclease Cas9 [Lactobacillus curvatus] | SEQ ID NO: 232 |
| AKP02966.1 | hypothetical protein ABB45_04605 [Lactobacillus farciminis] | SEQ ID NO: 233 |
| WP_010991369.1 | type II CRISPR RNA-guided endonuclease Cas9 [Listeria innocua] | SEQ ID NO: 234 |
| WP_033838504.1 | type II CRISPR RNA-guided endonuclease Cas9 [Listeria innocua] | SEQ ID NO: 235 |
| EHN60060.1 | CRISPR-associated protein, Csn1 family [Listeria innocua ATCC 33091] | SEQ ID NO: 236 |
| EFR89594.1 | crispr-associated protein, Csn1 family [Listeria innocua FSL S4-378] | SEQ ID NO: 237 |
| WP_038409211.1 | type II CRISPR RNA-guided endonuclease Cas9 [Listeria ivanovii] | SEQ ID NO: 238 |
| EFR95520.1 | crispr-associated protein Csn1 [Listeria ivanovii FSL F6-596] | SEQ ID NO: 239 |
| WP_003723650.1 | type II CRISPR RNA-guided endonuclease Cas9 [Listeria monocytogenes] | SEQ ID NO: 240 |
| WP_003727705.1 | type II CRISPR RNA-guided endonuclease Cas9 [Listeria monocytogenes] | SEQ ID NO: 241 |
| WP_003730785.1 | type II CRISPR RNA-guided endonuclease Cas9 [Listeria monocytogenes] | SEQ ID NO: 242 |
| WP_003733029.1 | type II CRISPR RNA-guided endonuclease Cas9 [Listeria monocytogenes] | SEQ ID NO: 243 |
| WP_003739838.1 | type II CRISPR RNA-guided endonuclease Cas9 [Listeria monocytogenes] | SEQ ID NO: 244 |
| WP_014601172.1 | type II CRISPR RNA-guided endonuclease Cas9 [Listeria monocytogenes] | SEQ ID NO: 245 |
| WP_023548323.1 | type II CRISPR RNA-guided endonuclease Cas9 [Listeria monocytogenes] | SEQ ID NO: 246 |
| WP_031665337.1 | type II CRISPR RNA-guided endonuclease Cas9 [Listeria monocytogenes] | SEQ ID NO: 247 |
| WP_031669209.1 | type II CRISPR RNA-guided endonuclease Cas9 [Listeria monocytogenes] | SEQ ID NO: 248 |
| WP_033920898.1 | type II CRISPR RNA-guided endonuclease Cas9 [Listeria monocytogenes] | SEQ ID NO: 249 |
| AKI42028.1 | CRISPR-associated protein [Listeria monocytogenes] | SEQ ID NO: 250 |
| AKI50529.1 | CRISPR-associated protein [Listeria monocytogenes] | SEQ ID NO: 251 |
| EFR83390.1 | crispr-associated protein Csn1 [Listeria monocytogenes FSL F2-208] | SEQ ID NO: 252 |
| WP_046323366.1 | type II CRISPR RNA-guided endonuclease Cas9 [Listeria seeligeri] | SEQ ID NO: 253 |
| AKE81011.1 | Cas9 [Plant multiplex genome editing vector pYLCRISPR/Cas9Pubi-H] | SEQ ID NO: 254 |
| CUO82355.1 | Uncharacterized protein conserved in bacteria [Roseburia hominis] | SEQ ID NO: 255 |
| WP_033162887.1 | type II CRISPR RNA-guided endonuclease Cas9 [Sharpea azabuensis] | SEQ ID NO: 256 |
| AGZ01981.1 | Cas9 endonuclease [synthetic construct] | SEQ ID NO: 257 |
| AKA60242.1 | nuclease deficient Cas9 [synthetic construct] | SEQ ID NO: 258 |
| AKS40380.1 | Cas9 [Synthetic plasmid pFC330] | SEQ ID NO: 259 |
| 4UN5_B | Cas9, Chain B, Crystal Structure | SEQ ID NO: 260 |

[0253] Non-limiting examples of suitable deaminase domains are provided.

Human AID
(SEQ ID NO: 303)
[sequence omitted]
(underline: nuclear localization signal; double underline:
nuclear export signal)
Mouse AID
(SEQ ID NO: 271)
MDSLLMKQKKFLYHFKNVRWAKGRHETYLCYVVKRRDSATSCSLDFGHLRNKSGCHVELLFLRYISDWD
LDPGRCYRVTWFTSWSPCYDCARHVAEFLRWNPNLSLRIFTARLYFCEDRKAEPEGLRRLHRAGVQIGIMT
FKDYFYCWNTFVENRERTFKAWEGLHENSVRLTRQLRRILLPLYEVDDLRDAFRMLGF
(underline: nuclear localization signal; double underline:
nuclear export signal)
Dog AID
(SEQ ID NO: 272)
MDSLLMKQRKFLYHFKNVRWAKGRHETYLCYVVKRRDSATSFSLDFGHLRNKSGCHVELLFLRYISDWD
LDPGRCYRVTWFTSWSPCYDCARHVADFLRGYPNLSLRIFAARLYFCEDRKAEPEGLRRLHRAGVQIAIMT
FKDYFYCWNTFVENREKTFKAWEGLHENSVRLSRQLRRILLPLYEVDDLRDAFRTLGL
(underline: nuclear localization signal; double underline:
nuclear export signal)
Bovine AID
(SEQ ID NO: 273)
MDSLLKKQRQFLYQFKNVRWAKGRHETYLCYVVKRRDSPTSFSLDFGHLRNKAGCHVELLFLRYISDWD
LDPGRCYRVTWFTSWSPCYDCARHVADFLRGYPNLSLRIFTARLYFCDKERKAEPEGLRRLHRAGVQIAIM
TFKDYFYCWNTFVENHERTFKAWEGLHENSVRLSRQLRRILLPLYEVDDLRDAFRTLGL
(underline: nuclear localization signal; double underline:
nuclear export signal)
Mouse APOBEC-3
(SEQ ID NO: 274)
MGPFCLGCSHRKCYSPIRNLISQETFKFHFKNLGYAKGRKDTFLCYEVTRKDCDSPVSLHHGVFKNKDNIH
AEICFLYWFHDKVLKVLSPREEFKITWYMSWSPCFECAEQIVRFLATHHNLSLDIFSSRLYNVQDPETQQNLCR
LVQEGAQVAAMDLYEFKKCWKKFVDNGGRRFRPWKRLLTNFRYQDSKLQEILRPCYIPVPSSSSSTLSNIC
LTKGLPETRFCVEGRRMDPLSEEEFYSQFYNQRVKHLCYYHRMKPYLCYQLEQFNGQAPLKGCLLSEKGK
QHAEILFLDKIRSMELSQVTITCYLTWSPCPNCAWQLAAFKRDRPDLILHIYTSRLYFHWKRPFQKGLCSLWQ
SGILVDVMDLPQFTDCWTNFVNPKRPFWPWKGLEIISRRTQRRLRRIKESWGLQDLVNDFGNLQLGPPMS
(italic: nucleic acid editing domain)
Rat APOBEC-3
(SEQ ID NO: 275)
MGPFCLGCSHRKCYSPIRNLISQETFKFHFKNLRYAIDRKDTFLCYEVTRKDCDSPVSLHHGVFKNKDNIHA
EICFLYWFHDKVLKVLSPREEFKITWYMSWSPCFECAEQVLRFLATHHNLSLDIFSSRLYNIRDPENQQNLCRL
VQEGAQVAAMDLYEFKKCWKKFVDNGGRRFRPWKKLLTNFRYQDSKLQEILRPCYIPVPSSSSSTLSNICL
TKGLPETRFCVERRRVHLLSEEEFYSQFYNQRVKHLCYYHGVKPYLCYQLEQFNGQAPLKGCLLSEKGKQ
HAEILFLDKIRSMELSQVIITCYLTWSPCPNCAWQLAAFKRDRPDLILHIYTSRLYFHWKRPFQKGLCSLWQSG
ILVDVMDLPQFTDCWTNFVNPKRPFWPWKGLEIISRRTQRRLHRIKESWGLQDLVNDFGNLQLGPPMS
(italic: nucleic acid editing domain)
Rhesus macaque APOBEC-3G
(SEQ ID NO: 276)
MVEPMDPRTFVSNFNNRPILSGLNTVWLCCEVKTKDPSGPPLDAKIFQGKVYSKAKYHPEMRFLRWFHKW
RQLHHDQEYKVTWYVSWSPCTRCANSVATFLAKDPKVTLTIFVARLYYFWKPDYQQALRILCQKRGGPHAT
MKIMNYNEFQDCWNKFVDGRGKPFKPRNNLPKHYTLLQATLGELLRHLMDPGTFTSNFNNKPWVSGQHE
TYLCYKVERLHNDTWVPLNQHRGFLRNQAPNIHGFPKGRHAELCFLDLIPFWKLDGQQYRVTCFTSWSPCFS
CAQEMAKFISNNEHVSLCIFAARIYDDQGRYQEGLRALHRDGAKIAMMNYSEFEYCWDTFVDRQGRPFQP
WDGLDEHSQALSGRLRAI
(italic: nucleic acid editing domain; underline:
cytoplasmic localization signal)
Chimpanzee APOBEC-3G
(SEQ ID NO: 277)
MKPHFRNPVERMYQDTFSDNFYNRPILSHRNTVWLCYEVKTKGPSRPPLDAKIFRGQVYSKLKYHPEMRF
FHWFSKWRKLHRDQEYEVTWYISWSPCTKCTRDVATFLAEDPKVTLTIFVARLYYFWDPDYQEALRSLCQKR
DGPRATMKIMNYDEFQHCWSKFVYSQRELFEPWNNLPKYYILLHIMLGEILRHSMDPPTFTSNFNNELWVR
GRHETYLCYEVERLHNDTWVLLNQRRGFLCNQAPHKHGFLEGRHAELCFLDVIPFWKLDLHQDYRVTCFTS
WSPCFSCAQEMAKFISNNKHVSLCIFAARIYDDQGRCQEGLRTLAKAGAKISIMTYSEFKHCWDTFVDHQG
CPFQPWDGLEEHSQALSGRLRAILQNQGN
(italic: nucleic acid editing domain;
underline: cytoplasmic localization signal)
Green monkey APOBEC-3G
(SEQ ID NO: 278)
MNPQIRNMVEQMEPDIFVYYFNNRPILSGRNTVWLCYEVKTKDPSGPPLDANIFQGKLYPEAKDHPEMKFL
HWFRKWRQLHRDQEYEVTWYVSWSPCTRCANSVATFLAEDPKVTLTIFVARLYYFWKPDYQQALRILCQER
GGPHATMKIMNYNEFQHCWNEFVDGQGKPFKPRKNLPKHYTLLHATLGELLRHVMDPGTFTSNFNNKPW
VSGQRETYLCYKVERSHNDTWVLLNQHRGFLRNQAPDRHGFPKGRHAELCFLDLIPFWKLDDQQYRVTCFT
SWSPCFSCAQKMAKFISNNKHVSLCIFAARIYDDQGRCQEGLRTLHRDGAKIAVMNYSEFEYCWDTFVDR
QGRPFQPWDGLDEHSQALSGRLRAI
(italic: nucleic acid editing domain;
underline: cytoplasmic localization signal)
Human APOBEC-3G
(SEQ ID NO: 279)
MKPHFRNTVERMYRDTFSYNFYNRPILSRRNTVWLCYEVKTKGPSRPPLDAKIFRGQVYSELKYHPEMRFF
HWFSKWRKLHRDQEYEVTWYISWSPCTKCTRDMATFLAEDPKVTLTIFVARLYYFWDPDYQEALRSLCQKR
DGPRATMKIMNYDEFQHCWSKFVYSQRELFEPWNNLPKYYILLHIMLGEILRHSMDPPTFTFNFNNEPWVR
GRHETYLCYEVERMHNDTWVLLNQRRGFLCNQAPHKHGFLEGRHAELCFLDVIPFWKLDLDQDYRVTCFTS
WSPCFSCAQEMAKFISKNKHVSLCIFTARIYDDQGRCQEGLRTLAEAGAKISIMTYSEFKHCWDTFVDHQG
CPFQPWDGLDEHSQDLSGRLRAILQNQEN
(italic: nucleic acid editing domain;
underline: cytoplasmic localization signal)
Human APOBEC-3F
(SEQ ID NO: 280)
MKPHFRNTVERMYRDTFSYNFYNRPILSRRNTVWLCYEVKTKGPSRPRLDAKIFRGQVYSQPEHHAEMCFL
SWFCGNQLPAYKCFQITWFVSWTPCPDCVAKLAEFLAEHPNVTLTISAARLYYYWERDYRRALCRLSQAGA
RVKIMDDEEFAYCWENFVYSEGQPFMPWYKFDDNYAFLHRTLKEILRNPMEAMYPHIFYFHFKNLRKAY
GRNESWLCFTMEVVKHHSPVSWKRGVFRNQVDPETHCHAERCFLSWFCDDILSPNTNYEVTWYTSWSPCPE
CAGEVAEFLARHSNVNLTIFTARLYYFWDTDYQEGLRSLSQEGASVEIMGYKDFKYCWENFVYNDDEPFK
PWKGLKYNFLFLDSKLQEILE
(italic: nucleic acid editing domain)
Human APOBEC-3B
(SEQ ID NO: 281)
MNPQIRNPMERMYRDTFYDNFENEPILYGRSYTWLCYEVKIKRGRSNLLWDTGVFRGQVYFKPQYHAEM
CFLSWFCGNQLPAYKCFQITWFVSWTPCPDCVAKLAEFLSEHPNVTLTISAARLYYYWERDYRRALCRLSQA
GARVTIMDYEEFAYCWENFVYNEGQQFMPWYKFDENYAFLHRTLKEILRYLMDPDTFTFNFNNDPLVLRR
RQTYLCYEVERLDNGTWVLMDQHMGFLCNEAKNLLCGFYGRHAELRFLDLVPSLQLDPAQIYRVTWFISWS
PCFSWGCAGEVRAFLQENTHVRLRIFAARIYDYDPLYKEALQMLRDAGAQVSIMTYDEFEYCWDTFVYRQ
GCPFQPWDGLEEHSQALSGRLRAILQNQGN
(italic: nucleic acid editing domain)
Human APOBEC-3C:
(SEQ ID NO: 282)
MNPQIRNPMKAMYPGTFYFQFKNLWEANDRNETWLCFTVEGIKRRSVVSWKTGVFRNQVDSETHCHAER
CFLSWFCDDILSPNTKYQVTWYTSWSPCPDCAGEVAEFLARHSNVNLTIFTARLYYFQYPCYQEGLRSLSQEG
VAVEIMDYEDFKYCWENFVYNDNEPFKPWKGLKTNFRLLKRRLRESLQ
(italic: nucleic acid editing domain)
Human APOBEC-3A:
(SEQ ID NO: 283)
MEASPASGPRHLMDPHIFTSNFNNGIGRHKTYLCYEVERLDNGTSVKMDQHRGFLHNQAKNLLCGFYGRH
AELRFLDLVPSLQLDPAQIYRVTWFISWSPCFSWGCAGEVRAFLQENTHVRLRIFAARIYDYDPLYKEALQML
RDAGAQVSIMTYDEFKHCWDTFVDHQGCPFQPWDGLDEHSQALSGRLRAILQNQGN
(italic: nucleic acid editing domain)
Human APOBEC-3H:
(SEQ ID NO: 284)
MALLTAETFRLQFNNKRRLRRPYYPRKALLCYQLTPQNGSTPTRGYFENKKKCHAEICFINEIKSMGLDETQ
CYQVTCYLTWSPCSSCAWELVDFIKAHDHLNLGIFASRLYYHWCKPQQKGLRLLCGSQVPVEVMGFPKFAD
CWENFVDHEKPLSFNPYKMLEELDKNSRAIKRRLERIKIPGVRAQGRYMDILCDAEV
(italic: nucleic acid editing domain)
Human APOBEC-3D
(SEQ ID NO: 285)
MNPQIRNPMERMYRDTFYDNFENEPILYGRSYTWLCYEVKIKRGRSNLLWDTGVFRGPVLPKRQSNHRQE
VYFRFENHAEMCFLSWFCGNRLPANRRFQITWFVSWNPCLPCVVKVTKFLAEHPNVTLTISAARLYYYRDRD
WRWVLLRLHKAGARVKIMDYEDFAYCWENFVCNEGQPFMPWYKFDDNYASLHRTLKEILRNPMEAMYP
HIFYFHFKNLLKACGRNESWLCFTMEVTKHHSAVFRKRGVFRNQVDPETHCHAERCFLSWFCDDILSPNTN
YEVTWYTSWSPCPECAGEVAEFLARHSNVNLTIFTARLCYFWDTDYQEGLCSLSQEGASVKIMGYKDFVSC
WKNFVYSDDEPFKPWKGLQTNFRLLKRRLREILQ
(italic: nucleic acid editing domain)
Human APOBEC-1
(SEQ ID NO: 286)
MTSEKGPSTGDPTLRRRIEPWEFDVFYDPRELRKEACLLYEIKWGMSRKIWRSSGKNTTNHVEVNFIKKFTS
ERDFHPSMSCSITWFLSWSPCWECSQAIREFLSRHPGVTLVIYVARLFWHMDQQNRQGLRDLVNSGVTIQI
MRASEYYHCWRNFVNYPPGDEAHWPQYPPLWMMLYALELHCIILSLPPCLKISRRWQNHLTFFRLHLQNC
HYQTIPPHILLATGLIHPSVAWR
Mouse APOBEC-1
(SEQ ID NO: 287)
MSSETGPVAVDPTLRRRIEPHEFEVFFDPRELRKETCLLYEINWGGRHSVWRHTSQNTSNHVEVNFLEKFTT
ERYFRPNTRCSITWFLSWSPCGECSRAITEFLSRHPYVTLFIYIARLYHHTDQRNRQGLRDLISSGVTIQIMTE
QEYCYCWRNFVNYPPSNEAYWPRYPHLWVKLYVLELYCIILGLPPCLKILRRKQPQLTFFTITLQTCHYQRI
PPHLLWATGLK
Rat APOBEC-1
(SEQ ID NO: 288)
[sequence omitted]
Petromyzon marinus CDA1 (pmCDA1)
(SEQ ID NO: 289)
MTDAEYVRIHEKLDIYTFKKQFFNNKKSVSHRCYVLFELKRRGERRACFWGYAVNKPQSGTERGIHAEIFSI
RKVEEYLRDNPGQFTINWYSSWSPCADCAEKILEWYNQELRGNGHTLKIWACKLYYEKNARNQIGLWNL
RDNGVGLNVMVSEHYQCCRKIFIQSSHNQLNENRWLEKTLKRAEKRRSELSIMIQVKILHTTKSPAV
Human APOBEC3G D316R_D317R
(SEQ ID NO: 290)
MKPHFRNTVERMYRDTFSYNFYNRPILSRRNTVWLCYEVKTKGPSRPPLDAKIFRGQVYSELKYHPEMRFF
HWFSKWRKLHRDQEYEVTWYISWSPCTKCTRDMATFLAEDPKVTLTIFVARLYYFWDPDYQEALRSLCQ
KRDGPRATMKIMNYDEFQHCWSKFVYSQRELFEPWNNLPKYYILLHIMLGEILRHSMDPPTFTFNFNNEPW
VRGRHETYLCYEVERMHNDTWVLLNQRRGFLCNQAPHKHGFLEGRHAELCFLDVIPFWKLDLDQDYRVT
CFTSWSPCFSCAQEMAKFISKNKHVSLCIFTARIYRRQGRCQEGLRTLAEAGAKISIMTYSEFKHCWDTFVD
HQGCPFQPWDGLDEHSQDLSGRLRAILQNQEN
Human APOBEC3G chain A
(SEQ ID NO: 291)
MDPPTFTFNFNNEPWVRGRHETYLCYEVERMHNDTWVLLNQRRGFLCNQAPHKHGFLEGRHAELCFLDV
IPFWKLDLDQDYRVTCFTSWSPCFSCAQEMAKFISKNKHVSLCIFTARIYDDQGRCQEGLRTLAEAGAKISI
MTYSEFKHCWDTFVDHQGCPFQPWDGLDEHSQDLSGRLRAILQ
Human APOBEC3G chain A D120R_D121R
(SEQ ID NO: 292)
MDPPTFTFNFNNEPWVRGRHETYLCYEVERMHNDTWVLLNQRRGFLCNQAPHKHGFLEGRHAELCFLDV
IPFWKLDLDQDYRVTCFTSWSPCFSCAQEMAKFISKNKHVSLCIFTARIYRRQGRCQEGLRTLAEAGAKISI
MTYSEFKHCWDTFVDHQGCPFQPWDGLDEHSQDLSGRLRAILQ

[0254] Non-limiting examples of fusion proteins/nucleobase editors are provided.

His₆-rAPOBEC1-XTEN-dCas9 for Escherichia coli expression
(SEQ ID NO: 293)
MGSSHHHHHHMSSETGPVAVDPTLRRRIEPHEFEVFFDPRELRKETCLLYEINWGGRHSIWRHTSQNTNKH
VEVNFIEKFTTERYFCPNTRCSITWFLSWSPCGECSRAITEFLSRYPHVTLFIYIARLYHHADPRNRQGLRDLI
SSGVTIQIMTEQESGYCWRNFVNYSPSNEAHWPRYPHLWVRLYVLELYCIILGLPPCLNILRRKQPQLTFFTI
ALQSCHYQRLPPHILWATGLKSGSETPGTSESATPESDKKYSIGLAIGTNSVGWAVITDEYKVPSKKFKVLG
NTDRHSIKKNLIGALLFDSGETAEATRLKRTARRRYTRRKNRICYLQEIFSNEMAKVDDSFFHRLEESFLVE
EDKKHERHPIFGNIVDEVAYHEKYPTIYHLRKKLVDSTDKADLRLIYLALAHMIKFRGHFLIEGDLNPDNSD
VDKLFIQLVQTYNQLFEENPINASGVDAKAILSARLSKSRRLENLIAQLPGEKKNGLFGNLIALSLGLTPNFK
SNFDLAEDAKLQLSKDTYDDDLDNLLAQIGDQYADLFLAAKNLSDAILLSDILRVNTEITKAPLSASMIKRY
DEHHQDLTLLKALVRQQLPEKYKEIFFDQSKNGYAGYIDGGASQEEFYKFIKPILEKMDGTEELLVKLNRE
DLLRKQRTFDNGSIPHQIHLGELHAILRRQEDFYPFLKDNREKIEKILTFRIPYYVGPLARGNSRFAWMTRKS
EETITPWNFEEVVDKGASAQSFIERMTNFDKNLPNEKVLPKHSLLYEYFTVYNELTKVKYVTEGMRKPAFL
SGEQKKAIVDLLFKTNRKVTVKQLKEDYFKKIECFDSVEISGVEDRFNASLGTYHDLLKIIKDKDFLDNEEN
EDILEDIVLTLTLFEDREMIEERLKTYAHLFDDKVMKQLKRRRYTGWGRLSRKLINGIRDKQSGKTILDFLK
SDGFANRNFMQLIHDDSLTFKEDIQKAQVSGQGDSLHEHIANLAGSPAIKKGILQTVKVVDELVKVMGRH
KPENIVIEMARENQTTQKGQKNSRERMKRIEEGIKELGSQILKEHPVENTQLQNEKLYLYYLQNGRDMYVD
QELDINRLSDYDVDAIVPQSFLKDDSIDNKVLTRSDKNRGKSDNVPSEEVVKKMKNYWRQLLNAKLITQR
KFDNLTKAERGGLSELDKAGFIKRQLVETRQITKHVAQILDSRMNTKYDENDKLIREVKVITLKSKLVSDFR
KDFQFYKVREINNYHHAHDAYLNAVVGTALIKKYPKLESEFVYGDYKVYDVRKMIAKSEQEIGKATAKYF
FYSNIMNFFKTEITLANGEIRKRPLIETNGETGEIVWDKGRDFATVRKVLSMPQVNIVKKTEVQTGGFSKESI
LPKRNSDKLIARKKDWDPKKYGGFDSPTVAYSVLVVAKVEKGKSKKLKSVKELLGITIMERSSFEKNPIDF
LEAKGYKEVKKDLIIKLPKYSLFELENGRKRMLASAGELQKGNELALPSKYVNFLYLASHYEKLKGSPEDN
EQKQLFVEQHKHYLDEIIEQISEFSKRVILADANLDKVLSAYNKHRDKPIREQAENIIHLFTLTNLGAPAAFK
YFDTTIDRKRYTSTKEVLDATLIHQSITGLYETRIDLSQLGGDSGGSPKKKRKV
rAPOBEC1-XTEN-dCas9-NLS for Mammalian expression (SEQ ID NO: 294)
MSSETGPVAVDPTLRRRIEPHEFEVFFDPRELRKETCLLYEINWGGRHSIWRHTSQNTNKHVEVNFIEKFTT
ERYFCPNTRCSITWFLSWSPCGECSRAITEFLSRYPHVTLFIYIARLYHHADPRNRQGLRDLISSGVTIQIMTE
QESGYCWRNFVNYSPSNEAHWPRYPHLWVRLYVLELYCIILGLPPCLNILRRKQPQLTFFTIALQSCHYQRL
PPHILWATGLKSGSETPGTSESATPESDKKYSIGLAIGTNSVGWAVITDEYKVPSKKFKVLGNTDRHSIKKN
LIGALLFDSGETAEATRLKRTARRRYTRRKNRICYLQEIFSNEMAKVDDSFFHRLEESFLVEEDKKHERHPIF
GNIVDEVAYHEKYPTIYHLRKKLVDSTDKADLRLIYLALAHMIKFRGHFLIEGDLNPDNSDVDKLFIQLVQT
YNQLFEENPINASGVDAKAILSARLSKSRRLENLIAQLPGEKKNGLFGNLIALSLGLTPNFKSNFDLAEDAKL
QLSKDTYDDDLDNLLAQIGDQYADLFLAAKNLSDAILLSDILRVNTEITKAPLSASMIKRYDEHHQDLTLLK
ALVRQQLPEKYKEIFFDQSKNGYAGYIDGGASQEEFYKFIKPILEKMDGTEELLVKLNREDLLRKQRTFDN
GSIPHQIHLGELHAILRRQEDFYPFLKDNREKIEKILTFRIPYYVGPLARGNSRFAWMTRKSEETITPWNFEEV
VDKGASAQSFIERMTNFDKNLPNEKVLPKHSLLYEYFTVYNELTKVKYVTEGMRKPAFLSGEQKKAIVDL
LFKTNRKVTVKQLKEDYFKKIECFDSVEISGVEDRFNASLGTYHDLLKIIKDKDFLDNEENEDILEDIVLTLT
LFEDREMIEERLKTYAHLFDDKVMKQLKRRRYTGWGRLSRKLINGIRDKQSGKTILDFLKSDGFANRNFM
QLIHDDSLTFKEDIQKAQVSGQGDSLHEHIANLAGSPAIKKGILQTVKVVDELVKVMGRHKPENIVIEMARE
NQTTQKGQKNSRERMKRIEEGIKELGSQILKEHPVENTQLQNEKLYLYYLQNGRDMYVDQELDINRLSDY
DVDAIVPQSFLKDDSIDNKVLTRSDKNRGKSDNVPSEEVVKKMKNYWRQLLNAKLITQRKFDNLTKAERG
GLSELDKAGFIKRQLVETRQITKHVAQILDSRMNTKYDENDKLIREVKVITLKSKLVSDFRKDFQFYKVREI
NNYHHAHDAYLNAVVGTALIKKYPKLESEFVYGDYKVYDVRKMIAKSEQEIGKATAKYFFYSNIMNFFKT
EITLANGEIRKRPLIETNGETGEIVWDKGRDFATVRKVLSMPQVNIVKKTEVQTGGFSKESILPKRNSDKLIA
RKKDWDPKKYGGFDSPTVAYSVLVVAKVEKGKSKKLKSVKELLGITIMERSSFEKNPIDFLEAKGYKEVK
KDLIIKLPKYSLFELENGRKRMLASAGELQKGNELALPSKYVNFLYLASHYEKLKGSPEDNEQKQLFVEQH
KHYLDEIIEQISEFSKRVILADANLDKVLSAYNKHRDKPIREQAENIIHLFTLTNLGAPAAFKYFDTTIDRKRY
TSTKEVLDATLIHQSITGLYETRIDLSQLGGDSGGSPKKKRKV
hAPOBEC1-XTEN-dCas9-NLS for Mammalian expression (SEQ ID NO: 295)
MTSEKGPSTGDPTLRRRIEPWEFDVFYDPRELRKEACLLYEIKWGMSRKIWRSSGKNTTNHVEVNFIKKFTS
ERDFHPSMSCSITWFLSWSPCWECSQAIREFLSRHPGVTLVIYVARLFWHMDQQNRQGLRDLVNSGVTIQI
MRASEYYHCWRNFVNYPPGDEAHWPQYPPLWMMLYALELHCIILSLPPCLKISRRWQNHLTFFRLHLQNC
HYQTIPPHILLATGLIHPSVAWRSGSETPGTSESATPESDKKYSIGLAIGTNSVGWAVITDEYKVPSKKFKVL
GNTDRHSIKKNLIGALLFDSGETALATRLKRTARRRYTRRKNRICYLQEIFSNEMAKVDDSFFHRLEESFLV
EEDKKHERHPIFGNIVDEVAYHEKYPTIYHLRKKLVDSTDKADLRLIYLALAHMIKFRGHFLIEGDLNPDNS
DVDKLFIQLVQTYNQLFEENPINASGVDAKAILSARLSKSRRLENLIAQLPGEKKNGLFGNLIALSLGLTPNF
KSNFDLAEDAKLQLSKDTYDDDLDNLLAQIGDQYADLFLAAKNLSDAILLSDILRVNTEITKAPLSASMIKR
YDEHHQDLTLLKALVRQQLPEKYKEIFFDQSKNGYAGYIDGGASQLEFYKFIKPILEKMDGTEELLVKLNR
EDLLRKQRTFDNGSIPHQIHLGELHAILRRQEDFYPFLKDNREKIEKILTFRIPYYVGPLARGNSRFAWMTRK
SEETITPWNFEEVVDKGASAQSFIERMTNFDKNLPNEKVLPKHSLLYEYFTVYNELTKVKYVTEGMRKPAF
LSGEQKKAIVDLLFKTNRKVTVKQLKEDYFKKIECFDSVEISGVEDRFNASLGTYHDLLKIIKDKDFLDNEE
NEDILEDIVLTLTLFEDREMIEERLKTYAHLFDDKVMKQLKRRRYTGWGRLSRKLINGIRDKQSGKTILDFL
KSDGFANRNFMQLIHDDSLTFKEDIQKAQVSGQGDSLHEHIANLAGSPAIKKGILQTVKVVDELVKVMGR
HKPENIVIEMARENQTTQKGQKNSRERMKRIEEGIKELGSQILKEHPVENTQLQNEKLYLYYLQNGRDMYV
DQELDINRLSDYDVDAIVPQSFLKDDSIDNKVLTRSDKNRGKSDNVPSEEVVKKMKNYWRQLLNAKLITQ
RKFDNLTKAERGGLSELDKAGFIKRQLVETRQITKHVAQILDSRMNTKYDENDKLIREVKVITLKSKLVSDF
RKDFQFYKVREINNYHHAHDAYLNAVVGTALIKKYPKLESEFVYGDYKVYDVRKMIAKSEQEIGKATAK
YFFYSNIMNFFKTEITLANGEIRKRPLIETNGETGEIVWDKGRDFATVRKVLSMPQVNIVKKTEVQTGGFSK
ESILPKRNSDKLIARKKDWDPKKYGGFDSPTVAYSVLVVAKVEKGKSKKLKSVKELLGITIMERSSFEKNPI
DFLEAKGYKEVKKDLIIKLPKYSLFELENGRKRMLASAGELQKGNELALPSKYVNFLYLASHYEKLKGSPE
DNEQKQLFVEQHKHYLDEIIEQISEFSKRVILADANLDKVLSAYNKHRDKPIREQAENIIHLFTLTNLGAPAA
FKYFDTTIDRKRYTSTKEVLDATLIHQSITGLYETRIDLSQLGGDSGGSPKKKRKV
rAPOBEC1-XTEN-dCas9-UGI-NLS (SEQ ID NO: 296)
MSSETGPVAVDPTLRRRIEPHEFEVFFDPRELRKETCLLYEINWGGRHSIWRHTSQNTNKHVEVNFIEKFTT
ERYFCPNTRCSITWFLSWSPCGECSRAITEFLSRYPHVTLFIYIARLYHHADPRNRQGLRDLISSGVTIQIMTE
QESGYCWRNFVNYSPSNEAHWPRYPHLWVRLYVLELYCIILGLPPCLNILRRKQPQLTFFTIALQSCHYQRL
PPHILWATGLKSGSETPGTSESATPESDKKYSIGLAIGTNSVGWAVITDEYKVPSKKFKVLGNTDRHSIKKN
LIGALLFDSGETAEATRLKRTARRRYTRRKNRICYLQEIFSNEMAKVDDSFFHRLEESFLVEEDKKHERHPIF
GNIVDEVAYHEKYPTIYHLRKKLVDSTDKADLRLIYLALAHMIKFRGHFLIEGDLNPDNSDVDKLFIQLVQT
YNQLFEENPINASGVDAKAILSARLSKSRRLENLIAQLPGEKKNGLFGNLIALSLGLTPNFKSNFDLAEDAKL
QLSKDTYDDDLDNLLAQIGDQYADLFLAAKNLSDAILLSDILRVNTEITKAPLSASMIKRYDEHHQDLTLLK
ALVRQQLPEKYKEIFFDQSKNGYAGYIDGGASQLEFYKFIKPILEKMDGTEELLVKLNREDLLRKQRTFDN
GSIPHQIHLGELHAILRRQEDFYPFLKDNREKIEKILTFRIPYYVGPLARGNSRFAWMTRKSEETITPWNFEEV
VDKGASAQSFIERMTNFDKNLPNEKVLPKHSLLYEYFTVYNELTKVKYVTEGMRKPAFLSGEQKKAIVDL
LFKTNRKVTVKQLKEDYFKKIECFDSVEISGVEDRFNASLGTYHDLLKIIKDKDFLDNEENEDILEDIVLTLT
LFEDREMIEERLKTYAHLFDDKVMKQLKRRRYTGWGRLSRKLINGIRDKQSGKTILDFLKSDGFANRNFM
QLIHDDSLTFKEDIQKAQVSGQGDSLHEHIANLAGSPAIKKGILQTVKVVDELVKVMGRHKPENIVIEMARE
NQTTQKGQKNSRERMKRIEEGIKELGSQILKEHPVENTQLQNEKLYLYYLQNGRDMYVDQELDINRLSDY
DVDAIVPQSFLKDDSIDNKVLTRSDKNRGKSDNVPSEEVVKKMKNYWRQLLNAKLITQRKFDNLTKAERG
GLSELDKAGFIKRQLVETRQITKHVAQILDSRMNTKYDENDKLIREVKVITLKSKLVSDFRKDFQFYKVREI
NNYHHAHDAYLNAVVGTALIKKYPKLESEFVYGDYKVYDVRKMIAKSEQEIGKATAKYFFYSNIMNFFKT
EITLANGEIRKRPLIETNGETGEIVWDKGRDFATVRKVLSMPQVNIVKKTEVQTGGFSKESILPKRNSDKLIA
RKKDWDPKKYGGFDSPTVAYSVLVVAKVEKGKSKKLKSVKELLGITIMERSSFEKNPIDFLEAKGYKEVK
KDLIIKLPKYSLFELENGRKRMLASAGELQKGNELALPSKYVNFLYLASHYEKLKGSPEDNEQKQLFVEQH
KHYLDEIIEQISEFSKRVILADANLDKVLSAYNKHRDKPIREQAENIIHLFTLTNLGAPAAFKYFDTTIDRKRY
TSTKEVLDATLIHQSITGLYETRIDLSQLGGDSGGSTNLSDIIEKETGKQLVIQESILMLPEEVEEVIGNKPESD
ILVHTAYDESTDENVMLLTSDAPEYKPWALVIQDSNGENKIKMLSGGSPKKKRKV
rAPOBEC1-XTEN-Cas9 nickase-UGI-NLS (BE3, SEQ ID NO: 297)
MSSETGPVAVDPTLRRRIEPHEFEVFFDPRELRKETCLLYEINWGGRHSIWRHTSQNTNKHVEVNFIEKFTT
ERYFCPNTRCSITWFLSWSPCGECSRAITEFLSRYPHVTLFIYIARLYHHADPRNRQGLRDLISSGVTIQIMTE
QESGYCWRNFVNYSPSNEAHWPRYPHLWVRLYVLELYCIILGLPPCLNILRRKQPQLTFFTIALQSCHYQRL
PPHILWATGLKSGSETPGTSESATPESDKKYSIGLAIGTNSVGWAVITDEYKVPSKKFKVLGNTDRHSIKKN
LIGALLFDSGETAEATRLKRTARRRYTRRKNRICYLQEIFSNEMAKVDDSFFHRLEESFLVEEDKKHERHPIF
GNIVDEVAYHEKYPTIYHLRKKLVDSTDKADLRLIYLALAHMIKFRGHFLIEGDLNPDNSDVDKLFIQLVQT
YNQLFEENPINASGVDAKAILSARLSKSRRLENLIAQLPGEKKNGLFGNLIALSLGLTPNFKSNFDLAEDAKL
QLSKDTYDDDLDNLLAQIGDQYADLFLAAKNLSDAILLSDILRVNTEITKAPLSASMIKRYDEHHQDLTLLK
ALVRQQLPEKYKEIFFDQSKNGYAGYIDGGASQLEFYKFIKPILEKMDGTEELLVKLNREDLLRKQRTFDN
GSIPHQIHLGELHAILRRQEDFYPFLKDNREKIEKILTFRIPYYVGPLARGNSRFAWMTRKSEETITPWNFEEV
VDKGASAQSFIERMTNFDKNLPNEKVLPKHSLLYEYFTVYNELTKVKYVTEGMRKPAFLSGEQKKAIVDL
LFKTNRKVTVKQLKEDYFKKIECFDSVEISGVEDRFNASLGTYHDLLKIIKDKDFLDNEENEDILEDIVLTITL
FEDREMIEERLKTYAHLFDDKVMKQLKRRRYTGWGRLSRKLINGIRDKQSGKTILDFLKSDGFANRNFMQ
LIHDDSLTFKEDIQKAQVSGQGDSLHEHIANLAGSPAIKKGILQTVKVVDELVKVMGRHKPENIVIEMAREN
QTTQKGQKNSRERMKRIEEGIKELGSQILKEHPVENTQLQNEKLYLYYLQNGRDMYVDQELDINRLSDYD
VDHIVPQSFLKDDSIDNKVLTRSDKNRGKSDNVPSEEVVKKMKNYWRQLLNAKLITQRKFDNLTKAERGG
LSELDKAGFIKRQLVETRQITKHVAQILDSRMNTKYDENDKLIREVKVITLKSKLVSDFRKDFQFYKVREIN
NYHHAHDAYLNAVVGTALIKKYPKLESEFVYGDYKVYDVRKMIAKSEQEIGKATAKYFFYSNIMNFFKTE
ITLANGEIRKRPLIETNGETGEIVWDKGRDFATVRKVLSMPQVNIVKKTEVQTGGFSKESILPKRNSDKLIAR
KKDWDPKKYGGFDSPTVAYSVLVVAKVEKGKSKKLKSVKELLGITIMERSSFEKNPIDFLEAKGYKEVKK
DLIIKLPKYSLFELENGRKRMLASAGELQKGNELALPSKYVNFLYLASHYEKLKGSPEDNEQKQLFVEQHK
HYLDEIIEQISEFSKRVILADANLDKVLSAYNKHRDKPIREQAENIIHLFTLTNLGAPAAFKYFDTTIDRKRYT
STKEVLDATLIHQSITGLYETRIDLSQLGGDSGGSTNLSDIIEKETGKQLVIQESILMLPEEVEEVIGNKPESDI
LVHTAYDESTDENVMLLTSDAPEYKPWALVIQDSNGENKIKMLSGGSPKKKRKV
pmCDA1-XTEN-dCas9-UGI (bacteria) (SEQ ID NO: 298)
MTDAEYVRIHEKLDIYTFKKQFFNNKKSVSHRCYVLFELKRRGERRACFWGYAVNKPQSGTERGIHAEIFSI
RKVEEYLRDNPGQFTINWYSSWSPCADCAEKILEWYNQELRGNGHTLKIWACKLYYEKNARNQIGLWNL
RDNGVGLNVMVSEHYQCCRKIFIQSSHNQLNENRWLEKTLKRAEKRRSELSIMIQVKILHTTKSPAVSGSET
PGTSESATPESDKKYSIGLAIGTNSVGWAVITDEYKVPSKKFKVLGNTDRHSIKKNLIGALLFDSGETAEAT
RLKRTARRRYTRRKNRICYLQEIFSNEMAKVDDSFFHRLEESFLVEEDKKHERHPIFGNIVDEVAYHEKYPT
IYHLRKKLVDSTDKADLRLIYLALAHMIKFRGHFLIEGDLNPDNSDVDKLFIQLVQTYNQLFEENPINASGV
DAKAILSARLSKSRRLENLIAQLPGEKKNGLFGNLIALSLGLTPNFKSNFDLAEDAKLQLSKDTYDDDLDNL
LAQIGDQYADLFLAAKNLSDAILLSDILRVNTEITKAPLSASMIKRYDEHHQDLTLLKALVRQQLPEKYKEI
FFDQSKNGYAGYIDGGASQEEFYKFIKPILEKMDGTEELLVKLNREDLLRKQRTFDNGSIPHQIHLGELHAIL
RRQEDFYPFLKDNREKIEKILTFRIPYYVGPLARGNSRFAWMTRKSEETITPWNFEEVVDKGASAQSFIERM
TNFDKNLPNEKVLPKHSLLYEYFTVYNELTKVKYVTEGMRKPAFLSGEQKKAIVDLLFKTNRKVTVKQLK
EDYFKKIECFDSVEISGVEDRFNASLGTYHDLLKIIKDKDFLDNEENEDILEDIVLTLTLFEDREMIEERLKTY
AHLFDDKVMKQLKRRRYTGWGRLSRKLINGIRDKQSGKTILDFLKSDGFANRNFMQLIHDDSLTFKEDIQK
AQVSGQGDSLHEHIANLAGSPAIKKGILQTVKVVDELVKVMGRHKPENIVIEMARENQTTQKGQKNSRER
MKRIEEGIKELGSQILKEHPVENTQLQNEKLYLYYLQNGRDMYVDQELDINRLSDYDVDAIVPQSFLKDDSI
DNKVLTRSDKNRGKSDNVPSEEVVKKMKNYWRQLLNAKLITQRKFDNLTKAERGGLSELDKAGFIKRQL
VETRQITKHVAQILDSRMNTKYDENDKLIREVKVITLKSKLVSDFRKDFQFYKVREINNYHHAHDAYLNAV
VGTALIKKYPKLESEFVYGDYKVYDVRKMIAKSEQEIGKATAKYFFYSNIMNFFKTEITLANGEIRKRPLIET
NGETGEIVWDKGRDFATVRKVLSMPQVNIVKKTEVQTGGFSKESILPKRNSDKLIARKKDWDPKKYGGFD
SPTVAYSVLVVAKVEKGKSKKLKSVKELLGITIMERSSFEKNPIDFLEAKGYKEVKKDLIIKLPKYSLFELEN
GRKRMLASAGELQKGNELALPSKYVNFLYLASHYEKLKGSPEDNEQKQLFVEQHKHYLDEIIEQISEFSKR
VILADANLDKVLSAYNKHRDKPIREQAENIIHLFTLTNLGAPAAFKYFDTTIDRKRYTSTKEVLDATLIHQSI
TGLYETRIDLSQLGGDSGGSMTNLSDIIEKETGKQLVIQESILMLPEEVELVIGNKPESDILVHTAYDESTDEN
VMLLTSDAPEYKPWALVIQDSNGENKIKML
pmCDA1-XTEN-nCas9-UGI-NLS (mammalian construct) (SEQ ID NO: 299):
MTDAEYVRIHEKLDIYTFKKQFFNNKKSVSHRCYVLFELKRRGERRACFWGYAVNKPQSGTERGIHAEIFSI
RKVELYLRDNPGQFTINWYSSWSPCADCALKILEWYNQELRGNGHTLKIWACKLYYEKNARNQIGLWNL
RDNGVGLNVMVSEHYQCCRKIFIQSSHNQLNENRWLEKTLKRAEKRRSELSIMIQVKILHTTKSPAVSGSET
PGTSESATPESDKKYSIGLAIGTNSVGWAVITDEYKVPSKKFKVLGNTDRHSIKKNLIGALLFDSGETAEAT
RLKRTARRRYTRRKNRICYLQEIFSNEMAKVDDSFFHRLEESFLVEEDKKHERHPIFGNIVDEVAYHEKYPT
IYHLRKKLVDSTDKADLRLIYLALAHMIKFRGHFLIEGDLNPDNSDVDKLFIQLVQTYNQLFEENPINASGV
DAKAILSARLSKSRRLENLIAQLPGEKKNGLFGNLIALSLGLTPNFKSNFDLAEDAKLQLSKDTYDDDLDNL
LAQIGDQYADLFLAAKNLSDAILLSDILRVNTEITKAPLSASMIKRYDEHHQDLTLLKALVRQQLPEKYKEI
FFDQSKNGYAGYIDGGASQEEFYKFIKPILEKMDGTEELLVKLNREDLLRKQRTFDNGSIPHQIHLGELHAIL
RRQEDFYPFLKDNREKIEKILTFRIPYYVGPLARGNSRFAWMTRKSEETITPWNFEEVVDKGASAQSFIERM
TNFDKNLPNEKVLPKHSLLYEYFTVYNELTKVKYVTEGMRKPAFLSGEQKKAIVDLLFKTNRKVTVKQLK
EDYFKKIECFDSVEISGVEDRFNASLGTYHDLLKIIKDKDFLDNEENEDILEDIVLTLTLFEDREMIEERLKTY
AHLFDDKVMKQLKRRRYTGWGRLSRKLINGIRDKQSGKTILDFLKSDGFANRNFMQLIHDDSLTFKEDIQK
AQVSGQGDSLHEHIANLAGSPAIKKGILQTVKVVDELVKVMGRHKPENIVIEMARENQTTQKGQKNSRER
MKRIEEGIKELGSQILKEHPVENTQLQNEKLYLYYLQNGRDMYVDQELDINRLSDYDVDHIVPQSFLKDDSI
DNKVLTRSDKNRGKSDNVPSEEVVKKMKNYWRQLLNAKLITQRKFDNLTKAERGGLSELDKAGFIKRQL
VETRQITKHVAQILDSRMNTKYDENDKLIREVKVITLKSKLVSDFRKDFQFYKVREINNYHHAHDAYLNAV
VGTALIKKYPKLESEFVYGDYKVYDVRKMIAKSEQEIGKATAKYFFYSNIMNFFKTEITLANGEIRKRPLIET
NGETGEIVWDKGRDFATVRKVLSMPQVNIVKKTEVQTGGFSKESILPKRNSDKLIARKKDWDPKKYGGFD
SPTVAYSVLVVAKVEKGKSKKLKSVKELLGITIMERSSFEKNPIDFLEAKGYKEVKKDLIIKLPKYSLFELEN
GRKRMLASAGELQKGNELALPSKYVNFLYLASHYEKLKGSPEDNEQKQLFVEQHKHYLDEIIEQISEFSKR
VILADANLDKVLSAYNKHRDKPIREQAENIIHLFTLTNLGAPAAFKYFDTTIDRKRYTSTKEVLDATLIHQSI
TGLYETRIDLSQLGGDSGGSTNLSDIIEKETGKQLVIQESILMLPEEVEEVIGNKPESDILVHTAYDESTDENV
MLLTSDAPEYKPWALVIQDSNGENKIKMLSGGSPKKKRKV
huAPOBEC3G-XTEN-dCas9-UGI (bacteria) (SEQ ID NO: 300)
MDPPTFTFNFNNEPWVRGRHETYLCYEVERMHNDTWVLLNQRRGFLCNQAPHKHGFLEGRHAELCFLDV
IPFWKLDLDQDYRVTCFTSWSPCFSCAQEMAKFISKNKHVSLCIFTARIYDDQGRCQEGLRTLAEAGAKISI
MTYSEFKHCWDTFVDHQGCPFQPWDGLDEHSQDLSGRLRAILQSGSETPGTSESATPESDKKYSIGLAIGTN
SVGWAVITDEYKVPSKKFKVLGNTDRHSIKKNLIGALLFDSGETALATRLKRTARRRYTRRKNRICYLQEIF
SNEMAKVDDSFFHRLEESFLVEEDKKHERHPIFGNIVDEVAYHEKYPTIYHLRKKLVDSTDKADLRLIYLAL
AHMIKFRGHFLIEGDLNPDNSDVDKLFIQLVQTYNQLFEENPINASGVDAKAILSARLSKSRRLENLIAQLPG
EKKNGLFGNLIALSLGLTPNFKSNFDLAEDAKLQLSKDTYDDDLDNLLAQIGDQYADLFLAAKNLSDAILL
SDILRVNTEITKAPLSASMIKRYDEHHQDLTLLKALVRQQLPEKYKEIFFDQSKNGYAGYIDGGASQLEFYK
FIKPILEKMDGTEELLVKLNREDLLRKQRTFDNGSIPHQIHLGELHAILRRQEDFYPFLKDNREKIEKILTFRIP
YYVGPLARGNSRFAWMTRKSEETITPWNFEEVVDKGASAQSFIERMTNFDKNLPNEKVLPKHSLLYEYFT
VYNELTKVKYVTEGMRKPAFLSGEQKKAIVDLLFKTNRKVTVKQLKEDYFKKIECFDSVEISGVEDRFNAS
LGTYHDLLKIIKDKDFLDNEENEDILEDIVLTLTLFEDREMIEERLKTYAHLFDDKVMKQLKRRRYTGWGR
LSRKLINGIRDKQSGKTILDFLKSDGFANRNFMQLIHDDSLTFKEDIQKAQVSGQGDSLHEHIANLAGSPAIK
KGILQTVKVVDELVKVMGRHKPENIVIEMARENQTTQKGQKNSRERMKRIEEGIKELGSQILKEHPVENTQ
LQNEKLYLYYLQNGRDMYVDQELDINRLSDYDVDAIVPQSFLKDDSIDNKVLTRSDKNRGKSDNVPSEEV
VKKMKNYWRQLLNAKLITQRKFDNLTKAERGGLSELDKAGFIKRQLVETRQITKHVAQILDSRMNTKYDE
NDKLIREVKVITLKSKLVSDFRKDFQFYKVREINNYHHAHDAYLNAVVGTALIKKYPKLESEFVYGDYKV
YDVRKMIAKSEQEIGKATAKYFFYSNIMNFFKTEITLANGEIRKRPLIETNGETGEIVWDKGRDFATVRKVL
SMPQVNIVKKTEVQTGGFSKESILPKRNSDKLIARKKDWDPKKYGGFDSPTVAYSVLVVAKVEKGKSKKL
KSVKELLGITIMERSSFEKNPIDFLEAKGYKEVKKDLIIKLPKYSLFELENGRKRMLASAGELQKGNELALPS
KYVNFLYLASHYEKLKGSPEDNEQKQLFVEQHKHYLDEIIEQISEFSKRVILADANLDKVLSAYNKHRDKPI
REQAENIIHLFTLTNLGAPAAFKYFDTTIDRKRYTSTKEVLDATLIHQSITGLYETRIDLSQLGGDSGGSMTN
LSDIIEKETGKQLVIQESILMLPEEVEEVIGNKPESDILVHTAYDESTDENVMLLTSDAPEYKPWALVIQDSN
GENKIKML
huAPOBEC3G-XTEN-nCas9-UGI-NLS (mammalian construct) (SEQ ID NO: 301)
MDPPTFTFNFNNEPWVRGRHETYLCYEVERMHNDTWVLLNQRRGFLCNQAPHKHGFLEGRHAELCFLDV
IPFWKLDLDQDYRVTCFTSWSPCFSCAQEMAKFISKNKHVSLCIFTARIYDDQGRCQEGLRTLAEAGAKISI
MTYSEFKHCWDTFVDHQGCPFQPWDGLDEHSQDLSGRLRAILQSGSETPGTSESATPESDKKYSIGLAIGTN
SVGWAVITDEYKVPSKKFKVLGNTDRHSIKKNLIGALLFDSGETAEATRLKRTARRRYTRRKNRICYLQEIF
SNEMAKVDDSFFHRLEESFLVEEDKKHERHPIFGNIVDEVAYHEKYPTIYHLRKKLVDSTDKADLRLIYLAL
AHMIKFRGHFLIEGDLNPDNSDVDKLFIQLVQTYNQLFEENPINASGVDAKAILSARLSKSRRLENLIAQLPG
EKKNGLFGNLIALSLGLTPNFKSNFDLAEDAKLQLSKDTYDDDLDNLLAQIGDQYADLFLAAKNLSDAILL
SDILRVNTEITKAPLSASMIKRYDEHHQDLTLLKALVRQQLPEKYKEIFFDQSKNGYAGYIDGGASQLEFYK
FIKPILEKMDGTEELLVKLNREDLLRKQRTFDNGSIPHQIHLGELHAILRRQEDFYPFLKDNREKIEKILTFRIP
YYVGPLARGNSRFAWMTRKSEETITPWNFEEVVDKGASAQSFIERMTNFDKNLPNEKVLPKHSLLYEYFT
VYNELTKVKYVTEGMRKPAFLSGEQKKAIVDLLFKTNRKVTVKQLKEDYFKKIECFDSVEISGVEDRFNAS
LGTYHDLLKIIKDKDFLDNEENEDILEDIVLTLTLFEDREMIEERLKTYAHLFDDKVMKQLKRRRYTGWGR
LSRKLINGIRDKQSGKTILDFLKSDGFANRNFMQLIHDDSLTFKEDIQKAQVSGQGDSLHEHIANLAGSPAIK
KGILQTVKVVDELVKVMGRHKPENIVIEMARENQTTQKGQKNSRERMKRIEEGIKELGSQILKEHPVENTQ
LQNEKLYLYYLQNGRDMYVDQELDINRLSDYDVDHIVPQSFLKDDSIDNKVLTRSDKNRGKSDNVPSEEV
VKKMKNYWRQLLNAKLITQRKFDNLTKAERGGLSELDKAGFIKRQLVETRQITKHVAQILDSRMNTKYDE
NDKLIREVKVITLKSKLVSDFRKDFQFYKVREINNYHHAHDAYLNAVVGTALIKKYPKLESEFVYGDYKV
YDVRKMIAKSEQEIGKATAKYFFYSNIMNFFKTEITLANGEIRKRPLIETNGETGEIVWDKGRDFATVRKVL
SMPQVNIVKKTEVQTGGFSKESILPKRNSDKLIARKKDWDPKKYGGFDSPTVAYSVLVVAKVEKGKSKKL
KSVKELLGITIMERSSFEKNPIDFLEAKGYKEVKKDLIIKLPKYSLFELENGRKRMLASAGELQKGNELALPS
KYVNFLYLASHYEKLKGSPEDNEQKQLFVEQHKHYLDEIIEQISEFSKRVILADANLDKVLSAYNKHRDKPI
REQAENIIHLFTLTNLGAPAAFKYFDTTIDRKRYTSTKEVLDATLIHQSITGLYETRIDLSQLGGDSGGSTNLS
DIIEKETGKQLVIQESILMLPEEVEEVIGNKPESDILVHTAYDESTDENVMLLTSDAPEYKPWALVIQDSNGE
NKIKMLSGGSPKKKRKV
huAPOBEC3G (D316R_D317R)-XTEN-nCas9-UGI-NLS (mammalian construct)
(SEQ ID NO: 302)
MDPPTFTFNFNNEPWVRGRHETYLCYEVERMHNDTWVLLNQRRGFLCNQAPHKHGFLEGRHAELCFLDV
IPFWKLDLDQDYRVTCFTSWSPCFSCAQEMAKFISKNKHVSLCIFTARIYRRQGRCQEGLRTLAEAGAKISI
MTYSEFKHCWDTFVDHQGCPFQPWDGLDEHSQDLSGRLRAILQSGSETPGTSESATPESDKKYSIGLAIGTN
SVGWAVITDEYKVPSKKFKVLGNTDRHSIKKNLIGALLFDSGETALATRLKRTARRRYTRRKNRICYLQEIF
SNEMAKVDDSFFHRLEESFLVEEDKKHERHPIFGNIVDEVAYHEKYPTIYHLRKKLVDSTDKADLRLIYLAL
AHMIKFRGHFLIEGDLNPDNSDVDKLFIQLVQTYNQLFEENPINASGVDAKAILSARLSKSRRLENLIAQLPG
EKKNGLFGNLIALSLGLTPNFKSNFDLAEDAKLQLSKDTYDDDLDNLLAQIGDQYADLFLAAKNLSDAILL
SDILRVNTEITKAPLSASMIKRYDEHHQDLTLLKALVRQQLPEKYKEIFFDQSKNGYAGYIDGGASQEEFYK
FIKPILEKMDGTEELLVKLNREDLLRKQRTFDNGSIPHQIHLGELHAILRRQEDFYPFLKDNREKIEKILTFRIP
YYVGPLARGNSRFAWMTRKSEETITPWNFEEVVDKGASAQSFIERMTNFDKNLPNEKVLPKHSLLYEYFT
VYNELTKVKYVTEGMRKPAFLSGEQKKAIVDLLFKTNRKVTVKQLKEDYFKKIECFDSVEISGVEDRFNAS
LGTYHDLLKIIKDKDFLDNEENEDILEDIVLTLTLFEDREMIEERLKTYAHLFDDKVMKQLKRRRYTGWGR
LSRKLINGIRDKQSGKTILDFLKSDGFANRNFMQLIHDDSLTFKEDIQKAQVSGQGDSLHEHIANLAGSPAIK
KGILQTVKVVDELVKVMGRHKPENIVIEMARENQTTQKGQKNSRERMKRIEEGIKELGSQILKEHPVENTQ
LQNEKLYLYYLQNGRDMYVDQELDINRLSDYDVDHIVPQSFLKDDSIDNKVLTRSDKNRGKSDNVPSEEV
VKKMKNYWRQLLNAKLITQRKFDNLTKAERGGLSELDKAGFIKRQLVETRQITKHVAQILDSRMNTKYDE
NDKLIREVKVITLKSKLVSDFRKDFQFYKVREINNYHHAHDAYLNAVVGTALIKKYPKLESEFVYGDYKV
YDVRKMIAKSEQEIGKATAKYFFYSNIMNFFKTEITLANGEIRKRPLIETNGETGEIVWDKGRDFATVRKVL
SMPQVNIVKKTEVQTGGFSKESILPKRNSDKLIARKKDWDPKKYGGFDSPTVAYSVLVVAKVEKGKSKKL
KSVKELLGITIMERSSFEKNPIDFLEAKGYKEVKKDLIIKLPKYSLFELENGRKRMLASAGELQKGNELALPS
KYVNFLYLASHYEKLKGSPEDNEQKQLFVEQHKHYLDEIIEQISEFSKRVILADANLDKVLSAYNKHRDKPI
REQAENIIHLFTLTNLGAPAAFKYFDTTIDRKRYTSTKEVLDATLIHQSITGLYETRIDLSQLGGDSGGSTNLS
DIIEKETGKQLVIQESILMLPEEVEEVIGNKPESDILVHTAYDESTDENVMLLTSDAPEYKPWALVIQDSNGE
NKIKMLSGGSPKKKRKV

### Example 2: CRISPR/Cas9 Genome/Base-Editing Methods for Modifying PCSK9 and Other Liver Proteins to Improve Circulating Cholesterol and Lipid Levels

[0255] Approximately 70% of cholesterol in circulation is transported within low-density lipoproteins (LDL), which are cleared in the liver by LDL receptor (LDL-R)-mediated endocytosis, with the added consequence of downregulation of the endogenous cholesterol biosynthetic pathway. PCSK9 is a secreted, globular, serine protease capable of proteolytic auto-processing of its N-terminal pro-domain into a potent endogenous inhibitor, which permanently blocks its catalytic site (FIGS. 1A to 1C). A list of pharmaceutical agents used to block PCSK9 function can be found in Table 12. Mature PCSK9 exits through the secretory pathway and acts as a protein-binding adaptor in clathrin-coated vesicles to bridge a pH-dependent interaction with the LDL receptor during endocytosis of LDL particles, which prevents recycling of the LDL receptor to the cell surface (FIG. 2).¹ Knock-out mice models of PCSK9 display remarkably low circulating cholesterol levels,² due to enhanced presentation of LDLR on the cell surface and elevated uptake of LDL particles by hepatocytes. Human genome-wide association studies have identified deleterious gain-of-function variants of PCSK9 in hypercholesterolemic patients,³ as well as beneficial loss-of-function and unstable PCKS9 variants in hypo-cholesterolemic individuals (FIGS. 1A to 1C, Table 1).^{3b, c, 4} A list of known human PCSK9 variants can be found in Table 18.

[0256] Over the past decade there has been significant interest in the pharmaceutical industry to abrogate the interaction between PCSK9 and LDLR using various strategies including antibodies, small-molecules, peptidic ligands, RNA-interference, and antisense oligonucleotides (FIG. 2). Recently, the first generation of CRISPR/Cas9 tools have been used to ablate the PCSK9 gene in vivo in mouse models.⁵ However, due to the large number of cells that need to be modified in vivo to modulate cholesterol levels, there is a pressing concern about low-frequency off-target genomic instability and oncogenic modifications that could be caused by genome-editing treatments.⁶ Bridging the gap towards clinical applications will require safe and efficient strategies to modify PCSK9 in a way that maximizes the therapeutic benefits (Table 1). The precisely targeted methods for PCSK9 modifications disclosed here could be superior to previously proposed strategies that create random indels in the PCSK9 genomic site using engineered nucleases,⁶ including CRISPR/Cas9,⁷ as well as dCas9-Fok1 fusions,⁸ Cas9 nickase pairs,⁹ TALENs, zinc-finger nucleases, etc.¹⁰ Moreover, strategies that rely on “base-editors” such as BE2 or BE3,¹¹ may have a more favorable safety profile, due to the relatively low impact that off-target cytosine deamination has on genomic stability,¹² including oncogene activation or tumor suppressor inactivation.¹³

[0257] Importantly, PCSK9 is secreted by hepatocytes into the extracellular medium,¹⁴ where it acts in cis as a paracrine factor on neighboring hepatocytes' LDL receptors.¹⁴ Due to incomplete penetrance of gene/protein delivery into tissues in vivo, a significant fraction of the copies of PCSK9 genes remain as unmodified/wildtype.¹⁵ Therefore, loss-of-function variants of PCSK9 that are efficiently expressed, auto-activated, and exported to engage the clathrin-coated pits from unmodified cells in a paracrine mechanism should be prioritized for genome/base-editing therapeutics.

[0258] This carefully calibrated PCSK9 loss-of-function strategy could be accomplished by engineering variants of the key residues that make direct contacts with the LDL-R binding region, and specifically the EGF-A domain (FIGS. 1A to 1C), such as the PCSK9 residues R194, R237, F379, the beta-sheet 5372 to D374, the C375-378 disulfide, etc. (Table 3) as well as engineered and naturally-occurring variants that may affect global folding, such as residues R46 and R237, and A443 (Table 3). This therapeutic strategy would be beneficial to hypercholesterolemic patients that carry neutral PCSK9 variants, but even more so for carriers of deleterious gain-of-function mutations of PCSK9, LDLR, APOB, etc. (for example PCSK9-D374Y, FIGS. 1A to 1C).^{1b} Moreover, administration of multiple guide-RNAs in vivo could enable simultaneous introduction of other potentially synergistic genetic modifications, for example the rare cardio-protective alleles for APOC3 (A43T and R19X),16 the IDOL/MYLIP loss-of-function allele R266X,¹⁷ and the LDL-R non-coding variants that elevate gene expression (Table 9).¹⁸

[0259] Finally, new cardio-protective variants of PCSK9 could be identified by treating cells in vitro with guide-RNA libraries designed for all possible PAMs in the genomic site, coupled with FACS sorting using reporters/labeling methods and DNA-deep sequencing, to find the guide-RNAs that programmed base-editing reactions that change a reporter gene expression or display elevated LDL-R on the cell surface. These new PCSK9 variants, as well as other cardioprotective alleles identified by genome-wide association studies (and similarly for LDL-R, IDOL, APOC3/C5, etc.), could be recapitulated using the types of guide-RNA programmed base-editing reactions described herein (Tables 2 and 3).

[0260] Importantly, the introduction of STOP codons can be predicted to be most efficacious in generating truncations when targeting residues in flexible loops, or which can be edited processively in tandem using one guide-RNA BE complex (guide RNAs highlighted in blue).Examples of tandem introduction of premature stop codons into PCSK9 include: W10X-W11X, Q99X-Q101X, Q342X-Q344X, Q554X-Q555X. Similarly, a structurally destabilizing variants followed by a stop codon could also be efficacious, for example: P530S/L-Q531X, P581S/LR582X, P618S/L-Q619X (guide RNAs highlighted in red). Residues found in loop/linker regions are labeled + or ++.

TABLE 19
Examples of Pharmaceutical Agents for Blocking PCSK9 Function

| Mechanism of Action | Agent | Company/Sponsor | Phase |
|---|---|---|---|
| Monoclonal antibodies | SAR236553/REGN727 | Sanofi/Regeneron | Approved |
| | AMG 145 | Amgen | Approved |
| | RN316 | Pfizer | 3 |
| | RG7652 | Roche/Genentech | 2 |
| | LGT-209 | Novartis | 2 |
| | 1D05-IgG2 | Merck | Pre-clinical |
| | 1B20 | Merck | Pre-clinical |
| | J10, J16 | Pfizer | Pre-clinical |
| | J17 | Pfizer | Pre-clinical |
| Adnectins | BMS-962476 | Briston-Myers Squibb/Adnexus | 1 |
| Mimetic peptides | EGF-AB peptide | Schering-Plough | Pre-clinical |
| | fragment | | |
| | LDLR (H306Y) | U.S. National Institutes of | Pre-clinical |
| | subfragment | Health | |
| | LDLR DNA construct | U.S. National Institutes of | Pre-clinical |
| | | Health | |
| Small-molecule | SX-PCK9 | Serometrix | Pre-clinical |
| inhibitors | TBD | Shifa Biomedical | Pre-clinical |
| | ISIS 394814 | Isis | Pre-clinical |
| | SPC4061 | Santaris-Pharma | Pre-clinical |
| | SPC5011 | Santaris-Pharma | 1 (terminated) |
| RNA interference | ALN-PCS02 | Alnylam | 1 |

### REFERENCES

[0261] 1. (a) Fisher, T. S.; Lo Surdo, P.; Pandit, S.; Mattu, M.; Santoro, J. C.; Wisniewski, D.; Cummings, R. T.; Calzetta, A.; Cubbon, R. M.; Fischer, P. A.; Tarachandani, A.; De Francesco, R.; Wright, S. D.; Sparrow, C. P.; Carfi, A.; Sitlani, A., Effects of pH and low density lipoprotein (LDL) on PCSK9-dependent LDL receptor regulation. The Journal of biological chemistry 2007, 282 (28), 20502-12; (b) Cunningham, D.; Danley, D. E.; Geoghegan, K. F.; Griffor, M. C.; Hawkins, J. L.; Subashi, T. A.; Varghese, A. H.; Ammirati, M. J.; Culp, J. S.; Hoth, L. R.; Mansour, M. N.; McGrath, K. M.; Seddon, A. P.; Shenolikar, S.; Stutzman-Engwall, K. J.; Warren, L. C.; Xia, D.; Qiu, X., Structural and biophysical studies of PCSK9 and its mutants linked to familial hypercholesterolemia. Nature structural & molecular biology 2007, 14 (5), 413-9.
[0262] 2. Rashid, S.; Curtis, D. E.; Garuti, R.; Anderson, N. N.; Bashmakov, Y.; Ho, Y. K.; Hammer, R. E.; Moon, Y. A.; Horton, J. D., Decreased plasma cholesterol and hypersensitivity to statins in mice lacking Pcsk9. Proceedings of the National Academy of Sciences of the United States of America 2005, 102 (15), 5374-9.
[0263] 3. (a) Abifadel, M.; Varret, M.; Rabes, J. P.; Allard, D.; Ouguerram, K.; Devillers, M.; Cruaud, C.; Benjannet, S.; Wickham, L.; Erlich, D.; Derre, A.; Villeger, L.; Farnier, M.; Beucler, I.; Bruckert, E.; Chambaz, J.; Chanu, B.; Lecerf, J. M.; Luc, G.; Moulin, P.; Weissenbach, J.; Prat, A.; Krempf, M.; Junien, C.; Seidah, N. G.; Boileau, C., Mutations in PCSK9 cause autosomal dominant hypercholesterolemia. Nature genetics 2003, 34 (2), 154-6; (b) Costet, P.; Krempf, M.; Cariou, B., PCSK9 and LDL cholesterol: unravelling the target to design the bullet. Trends in biochemical sciences 2008, 33 (9), 426-34; (c) Cohen, J. C.; Boerwinkle, E.; Mosley, T. H., Jr.; Hobbs, H. H., Sequence variations in PCSK9, low LDL, and protection against coronary heart disease. The New England journal of medicine 2006, 354 (12), 1264-72.
[0264] 4. (a) Benjannet, S.; Rhainds, D.; Hamelin, J.; Nassoury, N.; Seidah, N. G., The proprotein convertase (PC) PCSK9 is inactivated by furin and/or PC5/6A: functional consequences of natural mutations and post-translational modifications. The Journal of biological chemistry 2006, 281 (41), 30561-72; (b) Cohen, J.; Pertsemlidis, A.; Kotowski, I. K.; Graham, R.; Garcia, C. K.; Hobbs, H. H., Low LDL cholesterol in individuals of African descent resulting from frequent nonsense mutations in PCSK9. Nature genetics 2005, 37 (2), 161-5.
[0265] 5. (a) Ding, Q.; Strong, A.; Patel, K. M.; Ng, S. L.; Gosis, B. S.; Regan, S. N.; Cowan, C. A.; Rader, D. J.; Musunuru, K., Permanent alteration of PCSK9 with in vivo CRISPR-Cas9 genome editing. Circulation research 2014, 115 (5), 488-92; (b) Wang, X.; Raghavan, A.; Chen, T.; Qiao, L.; Zhang, Y.; Ding, Q.; Musunuru, K., CRISPR-Cas9 Targeting of PCSK9 in Human Hepatocytes In vivo-Brief Report. Arteriosclerosis, thrombosis, and vascular biology 2016, 36 (5), 783-6.
[0266] 6. Cox, D. B.; Platt, R. J.; Zhang, F., Therapeutic genome editing: prospects and challenges. Nature medicine 2015, 21 (2), 121-31.
[0267] 7. (a) Cong, L.; Ran, F. A.; Cox, D.; Lin, S.; Barretto, R.; Habib, N.; Hsu, P. D.; Wu, X.; Jiang, W.; Marraffini, L. A.; Zhang, F., Multiplex genome engineering using CRISPR/Cas systems. Science 2013, 339 (6121), 819-23; (b) Jinek, M.; Chylinski, K.; Fonfara, I.; Hauer, M.; Doudna, J. A.; Charpentier, E., A programmable dual-RNA-guided DNA endonuclease in adaptive bacterial immunity. Science 2012, 337 (6096), 816-21; (c) Mali, P.; Yang, L.; Esvelt, K. M.; Aach, J.; Guell, M.; DiCarlo, J. E.; Norville, J. E.; Church, G. M., RNA-guided human genome engineering via Cas9. Science 2013, 339 (6121), 823-6.
[0268] 8. (a) Guilinger, J. P.; Thompson, D. B.; Liu, D. R., Fusion of catalytically inactive Cas9 to FokI nuclease improves the specificity of genome modification. Nature biotechnology 2014, 32 (6), 577-82; (b) Tsai, S. Q.; Wyvekens, N.; Khayter, C.; Foden, J. A.; Thapar, V.; Reyon, D.; Goodwin, M. J.; Aryee, M. J.; Joung, J. K., Dimeric CRISPR RNA-guided FokI nucleases for highly specific genome editing. Nature biotechnology 2014, 32 (6), 569-76.
[0269] 9. Ran, F. A.; Hsu, P. D.; Lin, C. Y.; Gootenberg, J. S.; Konermann, S.; Trevino, A. E.; Scott, D. A.; Inoue, A.; Matoba, S.; Zhang, Y.; Zhang, F., Double nicking by RNAguided CRISPR Cas9 for enhanced genome editing specificity. Cell 2013, 154 (6), 1380-9.
[0270] 10. (a) Cradick, T. J.; Fine, E. J.; Antico, C. J.; Bao, G., CRISPR/Cas9 systems targeting β-globin and CCR5 genes have substantial off-target activity. Nucleic acids research 2013; (b) Holt, N.; Wang, J.; Kim, K.; Friedman, G.; Wang, X.; Taupin, V.; Crooks, G. M.; Kohn, D. B.; Gregory, P. D.; Holmes, M. C.; Cannon, P. M., Human hematopoietic stem/progenitor cells modified by zinc-finger nucleases targeted to CCR5 control HIV-1 in vivo. Nature biotechnology 2010, 28 (8), 839-47.
[0271] 11. Komor, A. C.; Kim, Y. B.; Packer, M. S.; Zuris, J. A.; Liu, D. R., Programmable editing of a target base in genomic DNA without double-stranded DNA cleavage. Nature 2016, advance online publication.
[0272] 12. Koonin, E. V.; Novozhilov, A. S., Origin and evolution of the genetic code: the universal enigma. IUBMB life 2009, 61 (2), 99-111.
[0273] 13. (a) Thomas, M. A.; Weston, B.; Joseph, M.; Wu, W.; Nekrutenko, A.; Tonellato, P. J., Evolutionary dynamics of oncogenes and tumor suppressor genes: higher intensities of purifying selection than other genes. Molecular biology and evolution 2003, 20 (6), 964-8; (b) Iengar, P., An analysis of substitution, deletion and insertion mutations in cancer genes. Nucleic acids research 2012, 40 (14), 6401-13.
[0274] 14. (a) Lagace, T. A.; Curtis, D. E.; Garuti, R.; McNutt, M. C.; Park, S. W.; Prather, H. B.; Anderson, N. N.; Ho, Y. K.; Hammer, R. E.; Horton, J. D., Secreted PCSK9 decreases the number of LDL receptors in hepatocytes and in livers of parabiotic mice. The Journal of clinical investigation 2006, 116 (11), 2995-3005; (b) Ferri, N.; Tibolla, G.; Pirillo, A.; Cipollone, F.; Mezzetti, A.; Pacia, S.; Corsini, A.; Catapano, A. L., Proprotein convertase subtilisin kexin type 9 (PCSK9) secreted by cultured smooth muscle cells reduces macrophages LDLR levels. Atherosclerosis 2012, 220 (2), 381-6.
[0275] 15. (a) Zuris, J. A.; Thompson, D. B.; Shu, Y.; Guilinger, J. P.; Bessen, J. L.; Hu, J. H.; Maeder, M. L.; Joung, J. K.; Chen, Z. Y.; Liu, D. R., Cationic lipid-mediated delivery of proteins enables efficient protein-based genome editing in vitro and in vivo. Nature biotechnology 2015, 33 (1), 73-80; (b) Yin, H.; Song, C. Q.; Dorkin, J. R.; Zhu, L. J.; Li, Y.; Wu, Q.; Park, A.; Yang, J.; Suresh, S.; Bizhanova, A.; Gupta, A.; Bolukbasi, M. F.; Walsh, S.; Bogorad, R. L.; Gao, G.; Weng, Z.; Dong, Y.; Koteliansky, V.; Wolfe, S. A.; Langer, R.; Xue, W.; Anderson, D. G., Therapeutic genome editing by combined viral and non-viral delivery of CRISPR system components in vivo. Nature biotechnology 2016, 34 (3), 328-33.
[0276] 16. Jorgensen, A. B.; Frikke-Schmidt, R.; Nordestgaard, B. G.; Tybjaerg-Hansen, A., Loss-of-function mutations in APOC3 and risk of ischemic vascular disease. The New England journal of medicine 2014, 371 (1), 32-41.
[0277] 17. Sorrentino, V.; Fouchier, S. W.; Motazacker, M. M.; Nelson, J. K.; Defesche, J. C.; Dallinga-Thie, G. M.; Kastelein, J. J.; Kees Hovingh, G.; Zelcer, N., Identification of a loss-of-function inducible degrader of the low-density lipoprotein receptor variant in individuals with low circulating low-density lipoprotein. European heart journal 2013, 34 (17), 1292-7.
[0278] 18. (a) Scholtz, C. L.; Peeters, A. V.; Hoogendijk, C. F.; Thiart, R.; de Villiers, J. N.; Hillermann, R.; Liu, J.; Marais, A. D.; Kotze, M. J., Mutation-59c->t in repeat 2 of the LDL receptor promoter: reduction in transcriptional activity and possible allelic interaction in a South African family with familial hypercholesterolaemia. Human molecular genetics 1999, 8 (11), 2025-30; (b) Gretarsdottir, S.; Helgason, H.; Helgadottir, A.; Sigurdsson, A.; Thorleifsson, G.; Magnusdottir, A.; Oddsson, A.; Steinthorsdottir, V.; Rafnar, T.; de Graaf, J.; Daneshpour, M. S.; Hedayati, M.; Azizi, F.; Grarup, N.; Jorgensen, T.; Vestergaard, H.; Hansen, T.; Eyjolfsson, G.; Sigurdardottir, O.; Olafsson, I.; Kiemeney, L. A.; Pedersen, O.; Sulem, P.; Thorgeirsson, G.; Gudbjartsson, D. F.; Holm, H.; Thorsteinsdottir, U.; Stefansson, K., A Splice Region Variant in LDLR Lowers Non-high Density Lipoprotein Cholesterol and Protects against Coronary Artery Disease. PLoS genetics 2015, 11 (9), e1005379; (c) van Zyl, T.; Jerling, J. C.; Conradie, K. R.; Feskens, E. J., Common and rare single nucleotide polymorphisms in the LDLR gene are present in a black South African population and associate with low-density lipoprotein cholesterol levels. Journal of human genetics 2014, 59 (2), 88-94; (d) De Castro-Oros, I.; Perez-Lopez, J.; Mateo-Gallego, R.; Rebollar, S.; Ledesma, M.; Leon, M.; Cofan, M.; Casasnovas, J. A.; Ros, E.; Rodriguez-Rey, J. C.; Civeira, F.; Pocovi, M., A genetic variant in the LDLR promoter is responsible for part of the LDL-cholesterol variability in primary hypercholesterolemia. BMC medical genomics 2014, 7, 17.
[0279] 19. Kwon, H. J.; Lagace, T. A.; McNutt, M. C.; Horton, J. D.; Deisenhofer, J., Molecular basis for LDL receptor recognition by PCSK9. Proceedings of the National Academy of Sciences of the U.S. Pat. No. 2,008,105 (6), 1820-5.
[0280] 20. Dewpura, T.; Raymond, A.; Hamelin, J.; Seidah, N. G.; Mbikay, M.; Chretien, M.; Mayne, J., PCSK9 is phosphorylated by a Golgi casein kinase-like kinase ex vivo and circulates as a phosphoprotein in humans. The FEBS journal 2008, 275 (13), 3480-93.

### EQUIVALENTS AND SCOPE

[0281] In the claims articles such as “a,” “an,” and “the” may mean one or more than one unless indicated to the contrary or otherwise evident from the context. Claims or descriptions that include “or” between one or more members of a group are considered satisfied if one, more than one, or all of the group members are present in, employed in, or otherwise relevant to a given product or process unless indicated to the contrary or otherwise evident from the context. The invention includes embodiments in which exactly one member of the group is present in, employed in, or otherwise relevant to a given product or process. The invention includes embodiments in which more than one, or all of the group members are present in, employed in, or otherwise relevant to a given product or process.

[0282] Furthermore, the invention encompasses all variations, combinations, and permutations in which one or more limitations, elements, clauses, and descriptive terms from one or more of the listed claims is introduced into another claim. For example, any claim that is dependent on another claim can be modified to include one or more limitations found in any other claim that is dependent on the same base claim. Where elements are presented as lists, e.g., in Markush group format, each subgroup of the elements is also disclosed, and any element(s) can be removed from the group. It should it be understood that, in general, where the invention, or aspects of the invention, is/are referred to as comprising particular elements and/or features, certain embodiments of the invention or aspects of the invention consist, or consist essentially of, such elements and/or features. For purposes of simplicity, those embodiments have not been specifically set forth in haec verba herein.

[0283] It is also noted that the terms “comprising” and “containing” are intended to be open and permits the inclusion of additional elements or steps. Where ranges are given, endpoints are included. Furthermore, unless otherwise indicated or otherwise evident from the context and understanding of one of ordinary skill in the art, values that are expressed as ranges can assume any specific value or sub-range within the stated ranges in different embodiments of the invention, to the tenth of the unit of the lower limit of the range, unless the context clearly dictates otherwise.

[0284] This application refers to various issued patents, published patent applications, journal articles, and other publications, all of which are incorporated herein by reference. If there is a conflict between any of the incorporated references and the instant specification, the specification shall control. In addition, any particular embodiment of the present invention that falls within the prior art may be explicitly excluded from any one or more of the claims. Because such embodiments are deemed to be known to one of ordinary skill in the art, they may be excluded even if the exclusion is not set forth explicitly herein. Any particular embodiment of the invention can be excluded from any claim, for any reason, whether or not related to the existence of prior art.

[0285] Those skilled in the art will recognize or be able to ascertain using no more than routine experimentation many equivalents to the specific embodiments described herein. The scope of the present embodiments described herein is not intended to be limited to the above Description, but rather is as set forth in the appended claims. Those of ordinary skill in the art will appreciate that various changes and modifications to this description may be made without departing from the spirit or scope of the present invention, as defined in the following claims.

The application's sequence listing, which the Patent Office published only in electronic form, follows.

SEQUENCE LISTING (2058 sequences)

SEQ ID NO: 1 - protein, 1368 aa, Streptococcus pyogenes [sequence omitted]

SEQ ID NO: 2 - protein, 1368 aa, Streptococcus pyogenes
MDKKYSIGLAIGTNSVGWAVITDEYKVPSKKFKVLGNTDRHSIKKNLIGALLFDSGETAEATRLKRTARRRYTRRKNRICYLQEIFSNEMAKVDDSFFHRLEESFLVEEDKKHERHPIFGNIVDEVAYHEKYPTIYHLRKKLVDSTDKADLRLIYLALAHMIKFRGHFLIEGDLNPDNSDVDKLFIQLVQTYNQLFEENPINASGVDAKAILSARLSKSRRLENLIAQLPGEKKNGLFGNLIALSLGLTPNFKSNFDLAEDAKLQLSKDTYDDDLDNLLAQIGDQYADLFLAAKNLSDAILLSDILRVNTEITKAPLSASMIKRYDEHHQDLTLLKALVRQQLPEKYKEIFFDQSKNGYAGYIDGGASQEEFYKFIKPILEKMDGTEELLVKLNREDLLRKQRTFDNGSIPHQIHLGELHAILRRQEDFYPFLKDNREKIEKILTFRIPYYVGPLARGNSRFAWMTRKSEETITPWNFEEVVDKGASAQSFIERMTNFDKNLPNEKVLPKHSLLYEYFTVYNELTKVKYVTEGMRKPAFLSGEQKKAIVDLLFKTNRKVTVKQLKEDYFKKIECFDSVEISGVEDRFNASLGTYHDLLKIIKDKDFLDNEENEDILEDIVLTLTLFEDREMIEERLKTYAHLFDDKVMKQLKRRRYTGWGRLSRKLINGIRDKQSGKTILDFLKSDGFANRNFMQLIHDDSLTFKEDIQKAQVSGQGDSLHEHIANLAGSPAIKKGILQTVKVVDELVKVMGRHKPENIVIEMARENQTTQKGQKNSRERMKRIEEGIKELGSQILKEHPVENTQLQNEKLYLYYLQNGRDMYVDQELDINRLSDYDVDAIVPQSFLKDDSIDNKVLTRSDKNRGKSDNVPSEEVVKKMKNYWRQLLNAKLITQRKFDNLTKAERGGLSELDKAGFIKRQLVETRQITKHVAQILDSRMNTKYDENDKLIREVKVITLKSKLVSDFRKDFQFYKVREINNYHHAHDAYLNAVVGTALIKKYPKLESEFVYGDYKVYDVRKMIAKSEQEIGKATAKYFFYSNIMNFFKTEITLANGEIRKRPLIETNGETGEIVWDKGRDFATVRKVLSMPQVNIVKKTEVQTGGFSKESILPKRNSDKLIARKKDWDPKKYGGFDSPTVAYSVLVVAKVEKGKSKKLKSVKELLGITIMERSSFEKNPIDFLEAKGYKEVKKDLIIKLPKYSLFELENGRKRMLASAGELQKGNELALPSKYVNFLYLASHYEKLKGSPEDNEQKQLFVEQHKHYLDEIIEQISEFSKRVILADANLDKVLSAYNKHRDKPIREQAENIIHLFTLTNLGAPAAFKYFDTTIDRKRYTSTKEVLDATLIHQSITGLYETRIDLSQLGGD

SEQ ID NO: 3 - protein, 1368 aa, Streptococcus pyogenes
MDKKYSIGLAIGTNSVGWAVITDEYKVPSKKFKVLGNTDRHSIKKNLIGALLFDSGETAEATRLKRTARRRYTRRKNRICYLQEIFSNEMAKVDDSFFHRLEESFLVEEDKKHERHPIFGNIVDEVAYHEKYPTIYHLRKKLVDSTDKADLRLIYLALAHMIKFRGHFLIEGDLNPDNSDVDKLFIQLVQTYNQLFEENPINASGVDAKAILSARLSKSRRLENLIAQLPGEKKNGLFGNLIALSLGLTPNFKSNFDLAEDAKLQLSKDTYDDDLDNLLAQIGDQYADLFLAAKNLSDAILLSDILRVNTEITKAPLSASMIKRYDEHHQDLTLLKALVRQQLPEKYKEIFFDQSKNGYAGYIDGGASQEEFYKFIKPILEKMDGTEELLVKLNREDLLRKQRTFDNGSIPHQIHLGELHAILRRQEDFYPFLKDNREKIEKILTFRIPYYVGPLARGNSRFAWMTRKSEETITPWNFEEVVDKGASAQSFIERMTNFDKNLPNEKVLPKHSLLYEYFTVYNELTKVKYVTEGMRKPAFLSGEQKKAIVDLLFKTNRKVTVKQLKEDYFKKIECFDSVEISGVEDRFNASLGTYHDLLKIIKDKDFLDNEENEDILEDIVLTLTLFEDREMIEERLKTYAHLFDDKVMKQLKRRRYTGWGRLSRKLINGIRDKQSGKTILDFLKSDGFANRNFMQLIHDDSLTFKEDIQKAQVSGQGDSLHEHIANLAGSPAIKKGILQTVKVVDELVKVMGRHKPENIVIEMARENQTTQKGQKNSRERMKRIEEGIKELGSQILKEHPVENTQLQNEKLYLYYLQNGRDMYVDQELDINRLSDYDVDHIVPQSFLKDDSIDNKVLTRSDKNRGKSDNVPSEEVVKKMKNYWRQLLNAKLITQRKFDNLTKAERGGLSELDKAGFIKRQLVETRQITKHVAQILDSRMNTKYDENDKLIREVKVITLKSKLVSDFRKDFQFYKVREINNYHHAHDAYLNAVVGTALIKKYPKLESEFVYGDYKVYDVRKMIAKSEQEIGKATAKYFFYSNIMNFFKTEITLANGEIRKRPLIETNGETGEIVWDKGRDFATVRKVLSMPQVNIVKKTEVQTGGFSKESILPKRNSDKLIARKKDWDPKKYGGFDSPTVAYSVLVVAKVEKGKSKKLKSVKELLGITIMERSSFEKNPIDFLEAKGYKEVKKDLIIKLPKYSLFELENGRKRMLASAGELQKGNELALPSKYVNFLYLASHYEKLKGSPEDNEQKQLFVEQHKHYLDEIIEQISEFSKRVILADANLDKVLSAYNKHRDKPIREQAENIIHLFTLTNLGAPAAFKYFDTTIDRKRYTSTKEVLDATLIHQSITGLYETRIDLSQLGGD

SEQ ID NO: 4 - protein, 1053 aa, Streptococcus aureus
MKRNYILGLAIGITSVGYGIIDYETRDVIDAGVRLFKEANVENNEGRRSKRGARRLKRRRRHRIQRVKKLLFDYNLLTDHSELSGINPYEARVKGLSQKLSEEEFSAALLHLAKRRGVHNVNEVEEDTGNELSTKEQISRNSKALEEKYVAELQLERLKKDGEVRGSINRFKTSDYVKEAKQLLKVQKAYHQLDQSFIDTYIDLLETRRTYYEGPGEGSPFGWKDIKEWYEMLMGHCTYFPEELRSVKYAYNADLYNALNDLNNLVITRDENEKLEYYEKFQIIENVFKQKKKPTLKQIAKEILVNEEDIKGYRVTSTGKPEFTNLKVYHDIKDITARKEIIENAELLDQIAKILTIYQSSEDIQEELTNLNSELTQEEIEQISNLKGYTGTHNLSLKAINLILDELWHTNDNQIAIFNRLKLVPKKVDLSQQKEIPTTLVDDFILSPVVKRSFIQSIKVINAIIKKYGLPNDIIIELAREKNSKDAQKMINEMQKRNRQTNERIEEIIRTTGKENAKYLIEKIKLHDMQEGKCLYSLEAIPLEDLLNNPFNYEVDHIIPRSVSFDNSFNNKVLVKQEENSKKGNRTPFQYLSSSDSKISYETFKKHILNLAKGKGRISKTKKEYLLEERDINRFSVQKDFINRNLVDTRYATRGLMNLLRSYFRVNNLDVKVKSINGGFTSFLRRKWKFKKERNKGYKHHAEDALIIANADFIFKEWKKLDKAKKVMENQMFEEKQAESMPEIETEQEYKEIFITPHQIKHIKDFKDYKYSHRVDKKPNRELINDTLYSTRKDDKGNTLIVNNLNGLYDKDNDKLKKLINKSPEKLLMYHHDPQTYQKLKLIMEQYGDEKNPLYKYYEETGNYLTKYSKKDNGPVIKKIKYYGNKLNAHLDITDDYPNSRNKVVKLSLKPYRFDVYLDNGVYKFVTVKNLDVIKKENYYEVNSKCYEEAKKLKKISNQAEFIASFYNNDLIKINGELYRVIGVNNDLLNRIEVNMIDITYREYLENMNDKRPPRIIKTIASKTQSIKKYSTDILGNLYEVKSKKHPQIIKKG

SEQ ID NO: 5 - DNA, 4107 bp, Streptococcus pyogenes
atggataagaaatactcaataggcttagatatcggcacaaatagcgtcggatgggcggtgatcactgatgaatataaggttccgtctaaaaagttcaaggttctgggaaatacagaccgccacagtatcaaaaaaaatcttataggggctcttttatttgacagtggagagacagcggaagcgactcgtctcaaacggacagctcgtagaaggtatacacgtcggaagaatcgtatttgttatctacaggagattttttcaaatgagatggcgaaagtagatgatagtttctttcatcgacttgaagagtcttttttggtggaagaagacaagaagcatgaacgtcatcctatttttggaaatatagtagatgaagttgcttatcatgagaaatatccaactatctatcatctgcgaaaaaaattggtagattctactgataaagcggatttgcgcttaatctatttggccttagcgcatatgattaagtttcgtggtcattttttgattgagggagatttaaatcctgataatagtgatgtggacaaactatttatccagttggtacaaacctacaatcaattatttgaagaaaaccctattaacgcaagtggagtagatgctaaagcgattctttctgcacgattgagtaaatcaagacgattagaaaatctcattgctcagctccccggtgagaagaaaaatggcttatttgggaatctcattgctttgtcattgggtttgacccctaattttaaatcaaattttgatttggcagaagatgctaaattacagctttcaaaagatacttacgatgatgatttagataatttattggcgcaaattggagatcaatatgctgatttgtttttggcagctaagaatttatcagatgctattttactttcagatatcctaagagtaaatactgaaataactaaggctcccctatcagcttcaatgattaaacgctacgatgaacatcatcaagacttgactcttttaaaagctttagttcgacaacaacttccagaaaagtataaagaaatcttttttgatcaatcaaaaaacggatatgcaggttatattgatgggggagctagccaagaagaattttataaatttatcaaaccaattttagaaaaaatggatggtactgaggaattattggtgaaactaaatcgtgaagatttgctgcgcaagcaacggacctttgacaacggctctattccccatcaaattcacttgggtgagctgcatgctattttgagaagacaagaagacttttatccatttttaaaagacaatcgtgagaagattgaaaaaatcttgacttttcgaattccttattatgttggtccattggcgcgtggcaatagtcgttttgcatggatgactcggaagtctgaagaaacaattaccccatggaattttgaagaagttgtcgataaaggtgcttcagctcaatcatttattgaacgcatgacaaactttgataaaaatcttccaaatgaaaaagtactaccaaaacatagtttgctttatgagtattttacggtttataacgaattgacaaaggtcaaatatgttactgaaggaatgcgaaaaccagcatttctttcaggtgaacagaagaaagccattgttgatttactcttcaaaacaaatcgaaaagtaaccgttaagcaattaaaagaagattatttcaaaaaaatagaatgttttgatagtgttgaaatttcaggagttgaagatagatttaatgcttcattaggtacctaccatgatttgctaaaaattattaaagataaagattttttggataatgaagaaaatgaagatatcttagaggatattgttttaacattgaccttatttgaagatagggagatgattgaggaaagacttaaaacatatgctcacctctttgatgataaggtgatgaaacagcttaaacgtcgccgttatactggttggggacgtttgtctcgaaaattgattaatggtattagggataagcaatctggcaaaacaatattagattttttgaaatcagatggttttgccaatcgcaattttatgcagctgatccatgatgatagtttgacatttaaagaagacattcaaaaagcacaagtgtctggacaaggcgatagtttacatgaacatattgcaaatttagctggtagccctgctattaaaaaaggtattttacagactgtaaaagttgttgatgaattggtcaaagtaatggggcggcataagccagaaaatatcgttattgaaatggcacgtgaaaatcagacaactcaaaagggccagaaaaattcgcgagagcgtatgaaacgaatcgaagaaggtatcaaagaattaggaagtcagattcttaaagagcatcctgttgaaaatactcaattgcaaaatgaaaagctctatctctattatctccaaaatggaagagacatgtatgtggaccaagaattagatattaatcgtttaagtgattatgatgtcgatcacattgttccacaaagtttccttaaagacgattcaatagacaataaggtcttaacgcgttctgataaaaatcgtggtaaatcggataacgttccaagtgaagaagtagtcaaaaagatgaaaaactattggagacaacttctaaacgccaagttaatcactcaacgtaagtttgataatttaacgaaagctgaacgtggaggtttgagtgaacttgataaagctggttttatcaaacgccaattggttgaaactcgccaaatcactaagcatgtggcacaaattttggatagtcgcatgaatactaaatacgatgaaaatgataaacttattcgagaggttaaagtgattaccttaaaatctaaattagtttctgacttccgaaaagatttccaattctataaagtacgtgagattaacaattaccatcatgcccatgatgcgtatctaaatgccgtcgttggaactgctttgattaagaaatatccaaaacttgaatcggagtttgtctatggtgattataaagtttatgatgttcgtaaaatgattgctaagtctgagcaagaaataggcaaagcaaccgcaaaatatttcttttactctaatatcatgaacttcttcaaaacagaaattacacttgcaaatggagagattcgcaaacgccctctaatcgaaactaatggggaaactggagaaattgtctgggataaagggcgagattttgccacagtgcgcaaagtattgtccatgccccaagtcaatattgtcaagaaaacagaagtacagacaggcggattctccaaggagtcaattttaccaaaaagaaattcggacaagcttattgctcgtaaaaaagactgggatccaaaaaaatatggtggttttgatagtccaacggtagcttattcagtcctagtggttgctaaggtggaaaaagggaaatcgaagaagttaaaatccgttaaagagttactagggatcacaattatggaaagaagttcctttgaaaaaaatccgattgactttttagaagctaaaggatataaggaagttaaaaaagacttaatcattaaactacctaaatatagtctttttgagttagaaaacggtcgtaaacggatgctggctagtgccggagaattacaaaaaggaaatgagctggctctgccaagcaaatatgtgaattttttatatttagctagtcattatgaaaagttgaagggtagtccagaagataacgaacaaaaacaattgtttgtggagcagcataagcattatttagatgagattattgagcaaatcagtgaattttctaagcgtgttattttagcagatgccaatttagataaagttcttagtgcatataacaaacatagagacaaaccaatacgtgaacaagcagaaaatattattcatttatttacgttgacgaatcttggagctcccgctgcttttaaatattttgatacaacaattgatcgtaaacgatatacgtctacaaaagaagttttagatgccactcttatccatcaatccatcactggtctttatgaaacacgcattgatttgagtcagctaggaggtgactga

SEQ ID NO: 6 - protein, 1053 aa, Streptococcus aureus
MKRNYILGLDIGITSVGYGIIDYETRDVIDAGVRLFKEANVENNEGRRSKRGARRLKRRRRHRIQRVKKLLFDYNLLTDHSELSGINPYEARVKGLSQKLSEEEFSAALLHLAKRRGVHNVNEVEEDTGNELSTKEQISRNSKALEEKYVAELQLERLKKDGEVRGSINRFKTSDYVKEAKQLLKVQKAYHQLDQSFIDTYIDLLETRRTYYEGPGEGSPFGWKDIKEWYEMLMGHCTYFPEELRSVKYAYNADLYNALNDLNNLVITRDENEKLEYYEKFQIIENVFKQKKKPTLKQIAKEILVNEEDIKGYRVTSTGKPEFTNLKVYHDIKDITARKEIIENAELLDQIAKILTIYQSSEDIQEELTNLNSELTQEEIEQISNLKGYTGTHNLSLKAINLILDELWHTNDNQIAIFNRLKLVPKKVDLSQQKEIPTTLVDDFILSPVVKRSFIQSIKVINAIIKKYGLPNDIIIELAREKNSKDAQKMINEMQKRNRQTNERIEEIIRTTGKENAKYLIEKIKLHDMQEGKCLYSLEAIPLEDLLNNPFNYEVDHIIPRSVSFDNSFNNKVLVKQEENSKKGNRTPFQYLSSSDSKISYETFKKHILNLAKGKGRISKTKKEYLLEERDINRFSVQKDFINRNLVDTRYATRGLMNLLRSYFRVNNLDVKVKSINGGFTSFLRRKWKFKKERNKGYKHHAEDALIIANADFIFKEWKKLDKAKKVMENQMFEEKQAESMPEIETEQEYKEIFITPHQIKHIKDFKDYKYSHRVDKKPNRELINDTLYSTRKDDKGNTLIVNNLNGLYDKDNDKLKKLINKSPEKLLMYHHDPQTYQKLKLIMEQYGDEKNPLYKYYEETGNYLTKYSKKDNGPVIKKIKYYGNKLNAHLDITDDYPNSRNKVVKLSLKPYRFDVYLDNGVYKFVTVKNLDVIKKENYYEVNSKCYEEAKKLKKISNQAEFIASFYNNDLIKINGELYRVIGVNNDLLNRIEVNMIDITYREYLENMNDKRPPRIIKTIASKTQSIKKYSTDILGNLYEVKSKKHPQIIKKG

SEQ ID NO: 7 - protein, 1388 aa, Streptococcus thermophilus
MTKPYSIGLDIGTNSVGWAVITDNYKVPSKKMKVLGNTSKKYIKKNLLGVLLFDSGITAEGRRLKRTARRRYTRRRNRILYLQEIFSTEMATLDDAFFQRLDDSFLVPDDKRDSKYPIFGNLVEEKVYHDEFPTIYHLRKYLADSTKKADLRLVYLALAHMIKYRGHFLIEGEFNSKNNDIQKNFQDFLDTYNAIFESDLSLENSKQLEEIVKDKISKLEKKDRILKLFPGEKNSGIFSEFLKLIVGNQADFRKCFNLDEKASLHFSKESYDEDLETLLGYIGDDYSDVFLKAKKLYDAILLSGFLTVTDNETEAPLSSAMIKRYNEHKEDLALLKEYIRNISLKTYNEVFKDDTKNGYAGYIDGKTNQEDFYVYLKNLLAEFEGADYFLEKIDREDFLRKQRTFDNGSIPYQIHLQEMRAILDKQAKFYPFLAKNKERIEKILTFRIPYYVGPLARGNSDFAWSIRKRNEKITPWNFEDVIDKESSAEAFINRMTSFDLYLPEEKVLPKHSLLYETFNVYNELTKVRFIAESMRDYQFLDSKQKKDIVRLYFKDKRKVTDKDIIEYLHAIYGYDGIELKGIEKQFNSSLSTYHDLLNIINDKEFLDDSSNEAIIEEIIHTLTIFEDREMIKQRLSKFENIFDKSVLKKLSRRHYTGWGKLSAKLINGIRDEKSGNTILDYLIDDGISNRNFMQLIHDDALSFKKKIQKAQIIGDEDKGNIKEVVKSLPGSPAIKKGILQSIKIVDELVKVMGGRKPESIVVEMARENQYTNQGKSNSQQRLKRLEKSLKELGSKILKENIPAKLSKIDNNALQNDRLYLYYLQNGKDMYTGDDLDIDRLSNYDIDHIIPQAFLKDNSIDNKVLVSSASNRGKSDDFPSLEVVKKRKTFWYQLLKSKLISQRKFDNLTKAERGGLLPEDKAGFIQRQLVETRQITKHVARLLDEKFNNKKDENNRAVRTVKIITLKSTLVSQFRKDFELYKVREINDFHHAHDAYLNAVIASALLKKYPKLEPEFVYGDYPKYNSFRERKSATEKVYFYSNIMNIFKKSISLADGRVIERPLIEVNEETGESVWNKESDLATVRRVLSYPQVNVVKKVEEQNHGLDRGKPKGLFNANLSSKPKPNSNENLVGAKEYLDPKKYGGYAGISNSFAVLVKGTIEKGAKKKITNVLEFQGISILDRINYRKDKLNFLLEKGYKDIELIIELPKYSLFELSDGSRRMLASILSTNNKRGEIHKGNQIFLSQKFVKLLYHAKRISNTINENHRKYVENHKKEFEELFYYILEFNENYVGAKKNGKLLNSAFQSWQNHSIDELCSSFIGPTGSERKGLFELTSRGSAADFEFLGVKIPRYRDYTPSSLLKDATLIHQSVTGLYETRIDLAKLGEG

SEQ ID NO: 8 - protein, 1121 aa, Streptococcus thermophilus
MSDLVLGLDIGIGSVGVGILNKVTGEIIHKNSRIFPAAQAENNLVRRTNRQGRRLTRRKKHRRVRLNRLFEESGLITDFTKISINLNPYQLRVKGLTDELSNEELFIALKNMVKHRGISYLDDASDDGNSSIGDYAQIVKENSKQLETKTPGQIQLERYQTYGQLRGDFTVEKDGKKHRLINVFPTSAYRSEALRILQTQQEFNPQITDEFINRYLEILTGKRKYYHGPGNEKSRTDYGRYRTSGETLDNIFGILIGKCTFYPDEFRAAKASYTAQEFNLLNDLNNLTVPTETKKLSKEQKNQIINYVKNEKAMGPAKLFKYIAKLLSCDVADIKGYRIDKSGKAEIHTFEAYRKMKTLETLDIEQMDRETLDKLAYVLTLNTEREGIQEALEHEFADGSFSQKQVDELVQFRKANSSIFGKGWHNFSVKLMMELIPELYETSEEQMTILTRLGKQKTTSSSNKTKYIDEKLLTEEIYNPVVAKSVRQAIKIVNAAIKEYGDFDNIVIEMARETNEDDEKKAIQKIQKANKDEKDAAMLKAANQYNGKAELPHSVFHGHKQLATKIRLWHQQGERCLYTGKTISIHDLINNSNQFEVDHILPLSITFDDSLANKVLVYATANQEKGQRTPYQALDSMDDAWSFRELKAFVRESKTLSNKKKEYLLTEEDISKFDVRKKFIERNLVDTRYASRVVLNALQEHFRAHKIDTKVSVVRGQFTSQLRRHWGIEKTRDTYHHHAVDALIIAASSQLNLWKKQKNTLVSYSEDQLLDIETGELISDDEYKESVFKAPYQHFVDTLKSKEFEDSILFSYQVDSKFNRKISDATIYATRQAKVGKDKADETYVLGKIKDIYTQDGYDAFMKIYKKDKSKFLMYRHDPQTFEKVIEPILENYPNKQINEKGKEVPCNPFLKYKEEHGYIRKYSKKGNGPEIKSLKYYDSKLGNHIDITPKDSNNKVVLQSVSPWRADVYFNKTTGKYEILGLKYADLQFEKGTGTYKISQEKYNDIKKKEGVDSDSEFKFTLYKNDLLLVKDTETKEQQLFRFLSRTMPKQKHYVELKPYDKQKFEGGEALIKVLGNVANSGQCKKGLGKSNISIYKVRTDVLGNQHIIKNEGDKPKLDF

SEQ ID NO: 9 - protein, 1367 aa, Artificial Sequence
  Synthetic polypeptide
DKKYSIGLAIGTNSVGWAVITDEYKVPSKKFKVLGNTDRHSIKKNLIGALLFDSGETAEATRLKRTARRRYTRRKNRICYLQEIFSNEMAKVDDSFFHRLEESFLVEEDKKHERHPIFGNIVDEVAYHEKYPTIYHLRKKLVDSTDKADLRLIYLALAHMIKFRGHFLIEGDLNPDNSDVDKLFIQLVQTYNQLFEENPINASGVDAKAILSARLSKSRRLENLIAQLPGEKKNGLFGNLIALSLGLTPNFKSNFDLAEDAKLQLSKDTYDDDLDNLLAQIGDQYADLFLAAKNLSDAILLSDILRVNTEITKAPLSASMIKRYDEHHQDLTLLKALVRQQLPEKYKEIFFDQSKNGYAGYIDGGASQEEFYKFIKPILEKMDGTEELLVKLNREDLLRKQRTFDNGSIPHQIHLGELHAILRRQEDFYPFLKDNREKIEKILTFRIPYYVGPLARGNSRFAWMTRKSEETITPWNFEEVVDKGASAQSFIERMTAFDKNLPNEKVLPKHSLLYEYFTVYNELTKVKYVTEGMRKPAFLSGEQKKAIVDLLFKTNRKVTVKQLKEDYFKKIECFDSVEISGVEDRFNASLGTYHDLLKIIKDKDFLDNEENEDILEDIVLTLTLFEDREMIEERLKTYAHLFDDKVMKQLKRRRYTGWGALSRKLINGIRDKQSGKTILDFLKSDGFANRNFMALIHDDSLTFKEDIQKAQVSGQGDSLHEHIANLAGSPAIKKGILQTVKVVDELVKVMGRHKPENIVIEMARENQTTQKGQKNSRERMKRIEEGIKELGSQILKEHPVENTQLQNEKLYLYYLQNGRDMYVDQELDINRLSDYDVDHIVPQSFLKDDSIDNKVLTRSDKNRGKSDNVPSEEVVKKMKNYWRQLLNAKLITQRKFDNLTKAERGGLSELDKAGFIKRQLVETRAITKHVAQILDSRMNTKYDENDKLIREVKVITLKSKLVSDFRKDFQFYKVREINNYHHAHDAYLNAVVGTALIKKYPKLESEFVYGDYKVYDVRKMIAKSEQEIGKATAKYFFYSNIMNFFKTEITLANGEIRKRPLIETNGETGEIVWDKGRDFATVRKVLSMPQVNIVKKTEVQTGGFSKESILPKRNSDKLIARKKDWDPKKYGGFDSPTVAYSVLVVAKVEKGKSKKLKSVKELLGITIMERSSFEKNPIDFLEAKGYKEVKKDLIIKLPKYSLFELENGRKRMLASAGELQKGNELALPSKYVNFLYLASHYEKLKGSPEDNEQKQLFVEQHKHYLDEIIEQISEFSKRVILADANLDKVLSAYNKHRDKPIREQAENIIHLFTLTNLGAPAAFKYFDTTIDRKRYTSTKEVLDATLIHQSITGLYETRIDLSQLGGD

SEQ ID NO: 10 - protein, 1300 aa, Francisella novicida
MSIYQEFVNKYSLSKTLRFELIPQGKTLENIKARGLILDDEKRAKDYKKAKQIIDKYHQFFIEEILSSVCISEDLLQNYSDVYFKLKKSDDDNLQKDFKSAKDTIKKQISEYIKDSEKFKNLFNQNLIDAKKGQESDLILWLKQSKDNGIELFKANSDITDIDEALEIIKSFKGWTTYFKGFHENRKNVYSSNDIPTSIIYRIVDDNLPKFLENKAKYESLKDKAPEAINYEQIKKDLAEELTFDIDYKTSEVNQRVFSLDEVFEIANFNNYLNQSGITKFNTIIGGKFVNGENTKRKGINEYINLYSQQINDKTLKKYKMSVLFKQILSDTESKSFVIDKLEDDSDVVTTMQSFYEQIAAFKTVEEKSIKETLSLLFDDLKAQKLDLSKIYFKNDKSLTDLSQQVFDDYSVIGTAVLEYITQQIAPKNLDNPSKKEQELIAKKTEKAKYLSLETIKLALEEFNKHRDIDKQCRFEEILANFAAIPMIFDEIAQNKDNLAQISIKYQNQGKKDLLQASAEDDVKAIKDLLDQTNNLLHKLKIFHISQSEDKANILDKDEHFYLVFEECYFELANIVPLYNKIRNYITQKPYSDEKFKLNFENSTLANGWDKNKEPDNTAILFIKDDKYYLGVMNKKNNKIFDDKAIKENKGEGYKKIVYKLLPGANKMLPKVFFSAKSIKFYNPSEDILRIRNHSTHTKNGSPQKGYEKFEFNIEDCRKFIDFYKQSISKHPEWKDFGFRFSDTQRYNSIDEFYREVENQGYKLTFENISESYIDSVVNQGKLYLFQIYNKDFSAYSKGRPNLHTLYWKALFDERNLQDVVYKLNGEAELFYRKQSIPKKITHPAKEAIANKNKDNPKKESVFEYDLIKDKRFTEDKFFFHCPITINFKSSGANKFNDEINLLLKEKANDVHILSIDRGERHLAYYTLVDGKGNIIKQDTFNIIGNDRMKTNYHDKLAAIEKDRDSARKDWKKINNIKEMKEGYLSQVVHEIAKLVIEYNAIVVFEDLNFGFKRGRFKVEKQVYQKLEKMLIEKLNYLVFKDNEFDKTGGVLRAYQLTAPFETFKKMGKQTGIIYYVPAGFTSKICPVTGFVNQLYPKYESVSKSQEFFSKFDKICYNLDKGYFEFSFDYKNFGDKAAKGKWTIASFGSRLINFRNSDKNHNWDTREVYPTKELEKLLKDYSIEYGHGECIKAAICGESDKKFFAKLTSVLNTILQMRNSKTGTELDYLISPVADVNGNFFDSRQAPKNMPQDADANGAYHIGLKGLMLLGRIKNNQEGKKLNLVIKNEEYFEFVQNRNN

SEQ ID NO: 11 - protein, 1359 aa, Streptococcus pyogenes
MDKKYSIGLDIGTNSVGWAVITDEYKVPSKKFKVLGNTDRHSIKKNLIGALLFDSGETAEATRLKRTARRRYTRRKNRICYLQEIFSNEMAKVDDSFFHRLEESFLVEEDKKHERHPIFGNIVDEVAYHEKYPTIYHLRKKLVDSTDKADLRLIYLALAHMIKFRGHFLIEGDLNPDNSDVDKLFIQLVQTYNQLFEENINASGVDAKAILSARLSKSRRLENLIAQLPGEKKNGLFGNLIALSLGLTPNFKSNFDLAEDAKLQLSKDTYDDDLDNLLAQIGDQYADLFLAAKNLSDAILLSDILRVNTEITKAPLSASMIKRYDEHHQDLTLLKALVRQQLPEKYKEIFFDQSKNGYAGYIDGGASQEEFYKFIKPILEKMDGTEELLVKLNREDLLRKQRTFDNGSIPHQIHLGELHAILRRQEDFYPFLKDNREKIEKILTFRIPYYVGPLARGNSRFAWMTRKSEETITPWNFEEVVDKGASAQSFIERMTNFDKNLPNEKVLPKHSLLYEYFTVYNELTKVKYVTEGMRKPAFLSGEQKKAIVDLLFKTNRKVTVKQLKEDYFKKIECFDSVEISGVEDRFNASLGTYHDLLKIIKDKDFLDNEENEDILEDIVLTLTLFEDREMIEERLKTYAHLFDDKVMKQLKRRRYTGWGRLSRKLINGIRDKQSGKTILDFLKDGFANRNFMQLIHDDSLTFKEDIQKAQVSGQGDSLHEHIANLAGSPAIKKGILQTVKVVDELVKVMGRHKPENIVIEMARENQTTQKGQKNSRERMKRIEEGIKELGSQILKEHPVENTQLQNEKLYLYYLQNGRDMYVDQELDINRLSDYDVDHIVPQSFLKDDSIDNKVLTRSDKNRGKSDNVPSEEVVKKMKNYWRQLLNAKLITQRKFDNLTKAERGGLSELDKAGFIKRQLVETRQITKHVAQILDSRMNTKYDENDKLIREVKVITLKSKLVSDFRKDFQFYKVREINNYHHAHDAYLNAVVGTALIKKYPKLESEFVYGDYKVYDVSEQEIGKATAKYFFYSNIMNFFKTEITLANGEIRKRPLIETNGETGEIVWDKGRDFATVRKVLSMPQVNIVKKTEVQTGGFSKESILPKRNSDKLIARKKDWDPKKYGGFDSPTVAYSVLVVAKVEKGKSKKLKSVKELLGITIMERSSFEKNPIDFLEAKGYKEVKKDLIIKLPKYSLFELENGRKRMLASGELQKGNELALPSKYVNFLYLASHYEKLKGSPEDNEQKQLFVEQHKHYLDEIIEQISEFSKRVILADANLDKVLSAYNKHRDKPIREQAENIIHLFTLTNLGAPAAFKYFDTTIDRKRYTSTKEVLDATLIHQSITGLYETRIDLSQLGGD

SEQ ID NO: 12 - protein, 1355 aa, Streptococcus gallolyticus
MTKKNYSIGLDIGTNSVGWAVITDDYKVPAKKMKVLGNTDKKYIKKNLLGALLFDSGETAEATRLKRTARRRYTRRKNRLRYLQEIFANEIAKVDESFFQRLDESFLTDDDKTFDSHPIFGNKAEEDAYHQKFPTIYHLRKHLADSSEKADLRLVYLALAHMIKFRGHFLIEGELNAENTDVQKIFADFVGVYNRTFDDSHLSEITVDVASILTEKISKSRRLENLIKYYPTEKKNTLFGNLIALALGLQPNFKTNFKLSEDAKLQFSKDTYEEDLEELLGKIGDDYADLFTSAKNLYDAILLSGILTVDDNSTKAPLSASMIKRYVEHHEDLEKLKEFIKANKSELYHDIFKDKNKNGYAGYIENGVKQDEFYKYLKNILSKIKIDGSDYFLDKIEREDFLRKQRTFDNGSIPHQIHLQEMHAILRRQGDYYPFLKEKQDRIEKILTFRIPYYVGPLVRKDSRFAWAEYRSDEKITPWNFDKVIDKEKSAEKFITRMTLNDLYLPEEKVLPKHSHVYETYAVYNELTKIKYVNEQGKESFFDSNMKQEIFDHVFKENRKVTKEKLLNYLNKEFPEYRIKDLIGLDKENKSFNASLGTYHDLKKILDKAFLDDKVNEEVIEDIIKTLTLFEDKDMIHERLQKYSDIFTANQLKKLERRHYTGWGRLSYKLINGIRNKENNKTILDYLIDDGSANRNFMQLINDDTLPFKQIIQKSQVVGDVDDIEAVVHDLPGSPAIKKGILQSVKIVDELVKVMGGNPDNIVIEMARENQTTNRGRSQSQQRLKKLQNSLKPSYIEDKVENSHLQNDQLFLYYIQNGKDMYTGDELDIDHLSDYDIDHIIPQAFIKDDSIDNRVLTSSAKNRGKSDDVPSLDIVRARKAEWVRLYKSGLISKRKFDNLTKAERGGLTEADKAGFIKRQLVETRQITKHVAQILDARFNTEHDENDKVIRDVKVITLKSNLVSQFRKDFEFYKVREINDYHHAHDAYLNAVVGTALLKKYPKLASEFVYGEYKKYDISSDKATAKYFFYSNLMNFFKTKVKYADGTVFERPIIETNADGEIAWNKQIDFEKVRKVLSYPQVNIVKKVETQTGGFSKESILPKGDSDKLIPRKTKKVYWDTKKYGGFDSPTVAYSVFVVADVEKGKAKKLKTVKELVGISIMERSFFEENPVEFLENKGYHNIREDKLIKLPKYSLFEFEGGRRRLLASASELQKGNEMVLPGYLVELLYHAHRADNFNSTEYLNYVSEHKKEFEKVLSCVEDFANLYVDVEKNLSKIRAVADSMDNFSIEEISNSFINLLTLTALGAPADFNFLGEKIPRKRYTSTKECLNATLIHQSITGLYETRIDLSKLGEE

SEQ ID NO: 13 - protein, 1359 aa, Streptococcus mitis
KKGYSIGLDIGTNSVGFAVITDDYKVPSKKMKVLGNTDKRFIKKNLIGALLFDEGTTAEARRLKRTARRRYTRRKNRLRYLQEIFSEEMSKVDSSFFHRLDDSFLIPEDKRESKYPIFATLTEEKEYHKQFPTIYHLRKQLADSKEKTDLRLIYLALAHMIKYRGHFLYEEAFDIKNNDIQKIFNEFISIYDNTFEGSSLSGQNAQVEAIFTDKISKSAKRERVLKLFPDEKSTGLFSEFLKLIVGNQADFKKHFDLEDKAPLQFSKDTYDEDLENLLGQIGDDFTDLFVSAKKLYDAILLSGILTVTDPSTKAPLSASMIERYENHQNDLAALKQFIKNNLPEKYDEVFSDQSKDGYAGYIDGKTTQETFYKYIKNLLSKFEGTDYFLDKIEREDFLRKQRTFDNGSIPHQIHLQEMNAILRRQGEYYPFLKDNKEKIEKILTFRIPYYVGPLARGNRDFAWLTRNSDEAIRPWNFEEIVDKASSAEDFINKMTNYDLYLPEEKVLPKHSLLYETFAVYNELTKVKFIAEGLRDYQFLDSGQKKQIVNQLFKENRKVTEKDIIHYLHNVDGYDGIELKGIEKQFNASLSTYHDLLKIIKDKEFMDDAKNEAILENIVHTLTIFEDREMIKQRLAQYDSLFDEKVIKALTRRHYTGWGKLSAKLINGICDKQTGNTILDYLIDDGKINRNFMQLINDDGLSFKEIIQKAQVIGKTDDVKQVVQELSGSPAIKKGILQSIKIVDELVKVMGHAPESIVIEMARENQTTARGKKNSQQRYKRIEDSLKILASNILKENPTDNNQLQNDRLFLYYLQNGKDMYTGEALDINQLSSYDIDHIIPQAFIKDDSLDNRVLTSSKDNRGKSDNVPSIEVVQKRKAFWQQLLDSKLISERKFNNLTKAERGGLDERDKVGFIKRQLVETRQITKHVAQILDARYNTEVNEKDKKNRTVKIITLKSNLVSNFRKEFRLYKVREINDYHHAHDAYLNAVVAKAILKKYPKLEPEFVYGEYQKYDLSKDPKEVEKATEKYFFYSNLLNFFKEEVHYADGTIVKRENIEYSKDTGEIAWNKEKDFAIIKKVLSLPQVNIVKKREVQTGGFSKESILPKGNSDKLIPRKTKDILLDTTKYGGFDSPVIAYSILLIADIEKGKAKKLKTVKTLVGITIMEKAAFEENPITFLENKGYHNVRKENILCLPKYSLFELENGRRRLLASAKELQKGNEIVLPVYLTTLLYHSKNVHKLDEPGHLEYIQKHRNEFKDLLNLVSEFSQKYVLADANLEKIKSLYADNEQADIEILANSFINLLTFTALGAPAAFKFFGKDIDRKRYTTVSEILNATLIHQSITGLYETWIDLSKLGED

SEQ ID NO: 14 - protein, 986 aa, Staphylococcus Aureus
MKRNYILGLDIGITSVGYGIIDYETRDVIDAGVRLFKEANVENNEGRRSKRGARRLKRRRRHRIQRVKKLLFDYNLLTDHSELSGNPYEARVKGLSQKLSEEEFSAALLHLAKRRGVHNVNEVEEDTGNELSTKEQISRNSKLEEKYVAELQLERLKKDGEVRGSINRKTSDYVKEAKQLLKVQKAYHQLDQSFIDTYIDLLETRRTYYEGPGEGSPFGWKDIKEWYEMLMGHCTYFPEELRSVKYAYNADLYNALNDLNNLVITRDENEKLEYYEKFQIIENVFKQKKKPTLKQIAKEILVNEEDIKGYRVTSTGKPEFTNLKVYHDIKDITARKENAELLDQIAKILTIYQSSEDIQEELTNLNSELTQEEIEQISNLKGYTGTHNLSLKAINLILDELWTNDNQIAIFNRLKLVPKKVDLSQQKEIPTTLVDDFILSPVVKRSFIQSIKVINAIIKKYGLPNDIIIELAREKNSKDAQKMINEMQKQTNEEIIRTTGKENAKYLIEKIKLHDMQEGKCLYSLEAIPLEDLLNNPFNYEVDHIIPRSVSFDNSFNNKVLVKQEEASKKGNRTPFQYLSSSDSKISYETFKKHILNLAKGKGRISKTKKEYLLEERDQKDFINRNLVDTRYATRGLMNLLRSYFRVNNLDVKVKSINGGFTSFLRRKWKFKKERNKGYKHHAEDALIIANADFIFKEWKKLDKNQMFEEKETEQEYKEIFITPHQIKHIKDFKDYKYSHRVDKKPNREVNNLNGLYDKDNDKLKKLINKSPEKLLMYHHDPQTYQKKLIMEQYGDEKNLYKYYEETGNYLTKYSKKDNGPVIKKIKYYGNKLNAHLDITDDYPNSVKLSLKPYRFDVYLDNGVYKFVTVKNLDVIKKENYYEVNSKAYEEAKKKKISNQAEFIASFYNNDLIKINGELYRVIGVNNDLLNRIEVNMIDITYREYLENMNDKRPPRIIKTIASKTQSIKKLYEVKSKKHPQIIKKG

SEQ ID NO: 15 - protein, 1044 aa, Streptococcus pyogenes
LSASMIKRYDEHHQDLTLLKALVRQQLPEKYKEIFFDQSKNGYAGYIDGGASQEEFYKFIKPILEKMDGTEELLAKLNREDLLRKQRTFDNGSIPHQIHLGELHAILRRQEDFYPFLKDNREKIEKILTFRIPYYVGPLARGNSRFAWMTRKSEETITPWNFEEVVDKGASAQSFIERMTNFDKNLPNEKVLPKHSLLYEYFTVYNELTKVKYVTEGMRKPAFLSGEQKKAIVDLLFKTNRKVTVKQLKEDYFKKIECFDSVEISGVEDRFNASLGTYHDLLKIIKDKDFLDNEENEDILEDIVLTLTLFEDREMIEERLKTYAHLFDDKVMKQLKRRRYTGWGRLSRKLINGIRDKQSGKTILDFLKDGFANRNFMQLIHDDSLTFKEDLQKAQVSGQGDSLHEHIANLAGSPAIKKGILQTVKVVDELVKVMGRHKPENIVIEMARENQTTQKGQKNSRERMKRIEEGIKELGSDILKEYPVENTQLQNEKLYLYYLQNGRDMYVDQELDINRLSDYDVDHIVPQSFLKDDSIDNKVLTRSDKNRGKSDNVPSEEVVKKMKNYWKQLLNAKLITQRKFDNLTKAERGGLSELDKAGFIKRQLVETRQITKHVAQILDSRMNTKYDENDKLIREVRVITLKSKLVSDFRKDFQFYKVREINNYHHAHDAYLNAVVGTALIKKYPKLESEFVYGDYKVYDISEQEIGKATAKYFFYSNIMNFFKTEITLANGEIRKRPLIETNGETGEIVWDKGRDFATVRKVLSMPQVNIVKKTEVQTGGFSKESILPKRNSDKLIARKKDWDPKKYGGFDSPTVAYSVLVVAKVEKGKSKKLKSVKELVGITIMERSSFEKDPVDFLEAKGYKEVRKDLIIKLPKYSLFELENGRKRMLASGELQKGNELALPSKYVNFLYLASHYEKLKGSPEDNEQKQLFVEQHKHYLDEIIEQISEFSKRVILADANLDKVLSAYNKHRDKPIREQAENIIHLFTLTNLGAPAAFKCFDTTIGRNRYKSIKEVLDATLIHQSITGLYETRIDLSQLGGD

SEQ ID NO: 16 - protein, 1359 aa, Streptococcus pyogenes; identical to SEQ ID NO: 11

SEQ ID NO: 17 - protein, 1359 aa, Streptococcus pyogenes
MDKKYSIGLDIGTNSVGWAVITDDYKVPSKKLKGLGNTDRHGIKKNLIGALLFDSGETAEATRLKRTARRRYTRRKNRICYLQEIFSNEMAKVDDSFFHRLEESFLVEEDKKHERHPIFGNIVDEVAYHEKYPTIYHLRKKLADSTDKVDLRLIYLALAHMIKFRGHFLIEGDLNPDNSDVDKLFIQLVQTYNQLFEENINASRVDAKAILSARLSKSRRLENLIAQLPGEKKNGLFGNLIALSLGLTPNFKSNFDLAEDAKLQLSKDTYDDDLDNLLAQIGDQYADLFLAAKNLSDATLLSDILRVNSEITKAPLSASMIKRYDEHHQDLTLLKALVRQQLPEKYKEIFFDQSKNGYAGYIDGGASQEEFYKFIKPILEKMDGTEELLAKLNREDLLRKQRTFDNGSIPYQIHLGELHAILRRQEDFYPFLKDNREKIEKILTFRIPYYVGPLARGNSRFAWMTRKSEETITPWNFEEVVDKGASAQSFIERMTNFDKNLPNEKVLPKHSLLYEYFTVYNELTKVKYVTEGMRKPAFLSGEQKKAIVDLLFKTNRKVTVKQLKEDYFKKIECFDSVEISGVEDRFNASLGTYHDLLKIIKDKDFLDNEENEDILEDIVLTLTLFEDREMIEERLKTYAHLFDDKVMKQLKRRRYTGWGRLSRKLINGIRDKQSGKTILDFLKDGFANRNFMQLIHDDSLTFKEDIQKAQVSGQGDSLHEHIANLAGSPAIKKGILQTVKVVDELVKVMGRHKPENIVIEMARENQTTQKGQKNSRERMKRIEEGIKELGSDILKEYPVENTQLQNEKLYLYYLQNGRDMYVDQELDINRLSDYDVDHIVPQSFLKDDSIDNKVLTRSDKNRGKSDNVPSEEVVKKMKNYWRQLLNAKLITQRKFDNLTKAERGGLSELDKVGFIKRQLVETRQITKHVAQILDSRMNTKYDENDKLIREVRVITLKSKLVSDFRKDFQFYKVREINNYHHAHDAYLNAVVGTALIKKYPKLESEFVYGDYKVYDVSEQEIGKATAKYFFYSNIMNFFKTEITLANGEIRKRPLIETNGETGEIVWDKGRDFATVRKVLSMPQVNIVKKTEVQTGGFSKESILPKRNSDKLIARKKDWDPKKYGGFDSPTVAYSVLVVAKVEKGKSKKLKSVKELLGITIMERSSFEKDPIDFLEAKGYKEVRKDLIIKLPKYSLFELENGRKRMLASGELQKGNELALPSKYVNFLYLASHYEKLKGSPEDNEQKQLFVEQHKHYLDEIIEQISEFSKRVILADANLDKVLSAYNKHRDKPIREQAENIIHLFTLTNLGAPAAFKYFDTTIDRKRYTSTKEVLDATLIHQSITGLYETRIDLSQLGGD

SEQ ID NO: 18 - protein, 1359 aa, Streptococcus pyogenes
MDKKYSIGLDIGTNSVGWAVITDDYKVPSKKFKVLGNTDRHSIKKNLIGALLFDSGETAEATRLKRTARRRYTRRKNRICYLQEIFSNEMAKVDDSFFHRLEESFLVEEDKKHERHPIFGNIVDEVAYHEKYPTIYHLRKKLVDSTDKADLRLIYLALAHMIKFRGHFLIEGDLNPDNSDVDKLFIQLVQTYNQLFEENINASGVDAKAILSARLSKSRRLENLIAQLPGEKKNGLFGNLIALSLGLTPNFKSNFDLAEDAKLQLSKDTYDDDLDNLLAQIGDQYADLFLAAKNLSDAILLSDILRLNSEITKAPLSASMIKRYDEHHQDLTLLKALVRQQLPEKYKEIFFDQSKNGYAGYIDGGASQEEFYKFIKPILEKMDGTEELLAKLNREDLLRKQRTFDNGSIPHQIHLGELHAILRRQEDFYPFLKDNREKIEKILTFRIPYYVGPLARGNSRFAWMTRKSEETITPWNFEEVVDKGASAQSFIERMTNFDKNLPNEKVLPKHSLLYEYFTVYNELTKVKYVTEGMRKPAFLSGEQKKAIVDLLFKTNRKVTVKQLKEDYFKKIECFDSVEISGVEDRFNASLGTYHDLLKIIKDKDFLDNEENEDILEDIVLTLTLFEDREMIEERLKTYAHLFDDKVMKQLKRRRYTGWGRLSRKLINGIRDKQSGKTILDFLKDGFANRNFMQLIHDDSLTFKEDIQKAQVSGQGDSLHEHIANLAGSPAIKKGILQTVKVVDELVKVMGRHKPENIVIEMARENQTTQKGQKNSRERMKRIEEGIKELGSQILKEHPVENTQLQNEKLYLYYLQNGRDMYVDQELDINRLSDYDVDHIVPQSFIKDDSIDNKVLTRSDKNRGKSNNVPSEEVVKKMKNYWRQLLNAKLITQRKFDNLTKAERGGLSELDKAGFIKRQLVETRQITKHVAQILDSRMNTKYDENDKLIREVKVITLKSKLVSDFRKDFQFYKVREINNYHHAHDAYLNAVVGTALIKKYPKLESEFVYGDYKVYDVSEQEIGKATAKYFFYSNIMNFFKTEITLANGEIRKRPLIETNGETGEIVWDKGRDFATVRKVLSMPQVNIVKKTEVQTGGFSKESILPKRNSDKLIARKKDWDPKKYGGFDSPTVAYSVLVVAKVEKGKSKKLKSVKELLGITIMERSSFEKNPIDFLEAKGYKEVRKDLIVKLPKYSLFELENGRKRMLASGELQKGNELALPSKYVNFLYLASHYEKLKGSPEDNEQKQLFVEQHKHYLDEIIEQISEFSKRVILADANLDKVLSAYNKHRDKPIREQAENIIHLFTLTNLGAPAAFKYFDTTIDRKRYTSTKEVLDATFIHQSITGLYETRIDLSQLGGD

SEQ ID NO: 19 - protein, 1359 aa, Streptococcus pyogenes
MDKKYSIGLDIGTNSVGWAVITDDYKVPSKKFKVLGNTDRHSIKKNLIGALLFDSGETAEATRLKRTARRRYTRRKNRICYLQEIFSNEMAKVDDSFFHRLEESFLVEEDKKHERHPIFGNIVDEVAYHEKYPTIYHLRKKLVDSTDKADLRLIYLALAHMIKFRGHFLIEGDLNPDNSDVDKLFIQLVQTYNQLFEENINASGVDAKAILSARLSKSRRLENLIAQLPGEKKNGLFGNLIALSLGLTPNFKSNFDLAEDAKLQLSKDTYDDDLDNLLAQIGDQYADLFLAAKNLSDAILLSDILRVNTEITKAPLSASMIKRYDEHHQDLTLLKALVRQQLPEKYKEIFFDQSKNGYAGYIDGGASQEEFYKFIKPILEKMDGTEELLVKLNREDLLRKQRTFDNGSIPHQIHLGELHAILRRQEDFYPFLKDNREKIEKILTFRIPYYVGPLARGNSRFAWMTRKSEETITPWNFEEVVDKGASAQSFIERMTNFDKNLPNEKVLPKHSLLYEYFTVYNELTKVKYVTEGMRKPAFLSGEQKKAIVDLLFKTNRKVTVKQLKEDYFKKIECFDSVEISGVEDRFNASLGTYHDLLKIIKDKDFLDNEENEDILEDIVLTLTLFEDREMIEERLKTYAHLFDDKVMKQLKRRRYTGWGRLSRKLINGIRDKQSGKTILDFLKDGFANRNFMQLIHDDSLTFKEDIQKAQVSGQGDSLHEHIANLAGSPAIKKGILQTVKVVDELVKVMGRHKPENIVIEMARENQTTQKGQKNSRERMKRIEEGIKELGSQILKEHPVENTQLQNEKLYLYYLQNGRDMYVDQELDINRLSDYDVDHIVPQSFLKDDSIDNKVLTRSDKNRGKSDNVPSEEVVKKMKNYWRQLLNAKLITQRKFDNLTKAERGGLSELDKAGFIKRQLVETRQITKHVAQILDSRMNTKYDENDKLIREVKVITLKSKLVSDFRKDFQFYKVREINNYHHAHDAYLNAVVGTALIKKYPKLESEFVYGDYKVYDVSEQEIGKATAKYFFYSNIMNFFKTEITLANGEIRKRPLIETNGETGEIVWDKGRDFATVRKVLSMPQVNIVKKTEVQTGGFSKESILPKRNSDKLIARKKDWDPKKYGGFDSPTVAYSVLVVAKVEKGKSKKLKSVKELLGITIMERSSFEKNPIDFLEAKGYKEVKKDLIIKLPKYSLFELENGRKRMLASGELQKGNELALPSKYVNFLYLASHYEKLKGSPEDNEQKQLFVEQHKHYLDEIIEQISEFSKRVILADANLDKVLSAYNKHRDKPIREQAENIIHLFTLTNLGAPAAFKYFDTTIDRKRYTSTKEVLDATLIHQSITGLYETRIDLSQLGGD

SEQ ID NO: 20 - protein, 1359 aa, Streptococcus pyogenes
MDKKYSIGLDIGTNSVGWAVITDDYKVPSKKFKVLGNTDRHSIKKNLIGALLFDSGEIAEATRLKRTARRRYTRRKNRICYLQEIFSNEMAKVDDSFFHRLEESFLVEEDKKHERHPIFGNIVDEVAYHEKYPTIYHLRKKLVDSTDKADLRLIYLALAHMIKFRGHFLIEGDLNPDNSDVDKLFIQLVQTYNQLFEENINASGVDAKAILSARLSKSRRLENLIAQLPGEKKNGLFGNLIALSLGLTPNFKSNFDLAEDAKLQLSKDTYDDDLDNLLAQIGDQYADLFLAAKNLSDAILLSDILRLNSEITKAPLSASMIKRYDEHHQDLTLLKALVRQQLPEKYKEIFFDQSKNGYAGYIDGGASQEEFYKFIKPILEKMDGTEELLAKLNREDLLRKQRTFDNGSIPHQIHLGELHAILRRQEDFYPFLKDNREKIEKILTFRIPYYVGPLARGNSRFAWMTRKSEETITPWNFEEVVDKGASAQSFIERMTNFDKNLPNEKVLPKHSLLYEYFTVYNELTKVKYVTEGMRKPAFLSGEQKKAIVDLLFKTNRKVTVKQLKEDYFKKIECFDSVEISGVEDRFNASLGTYHDLLKIIKDKDFLDNEENEDILEDIVLTLTLFEDREMIEERLKTYAHLFDDKVMKQLKRRRYTVWGRLSRKLINGIRDKQSGKTILDFLKDGFANRNFMQLIHDDSLTFKEDIQKAQVSGQGDSLHEHIANLAGSPAIKKGILQTVKVVDELVKVMGRHKPENIVIEMARENQTTQKGQKNSRERMKRIEEGIKELGSQILKEHPVENTQLQNEKLYLYYLQNGRDMYVDQELDINRLSDYDVDHIVPQSFIKDDSIDNKVLTRSDKNRGKSDNVPSEEVVKKMKNYWRQLLNAKLITQRKFDNLTKAERGGLSELDKAGFIKRQLVETRQITKHVAQILDSRMNTKYDENDKLIREVKVITLKSKLVSDFRKDFQFYKVREINNYHHAHDAYLNAVVGTALIKKYPKLESEFVYGDYKVYDVSEQEIGKATAKYFFYSNIMNFFKTEITLANGEIRKRPLIETNGETGEIVWDKGRDFATVRKVLSMPQVNIVKKTEVQTGGFSKESILPKRNSDKLIARKKDWDPKKYGGFDSPTVAYSVLVVAKVEKGKSKKLKSVKELLGITIMERSSFEKNPIDFLEAKGYKEVRKDLIIKLPKYSLFELENGRKRMLASGELQKGNELALPSKYVNFLYLASHYEKLKGSPEDNEQKQLFVEQHKHYLDEIIEQISEFSKRVILADANLDKVLSAYNKHRDKPIREQAENIIHLFTLTNLGAPTAFKYFDTTIDRKRYTSTKEVLDATFIHQSITGLYETRIDLSQLGGD

SEQ ID NO: 21 - protein, 1359 aa, Streptococcus pyogenes
MDKKYSIGLDIGTNSVGWAVITDDYKVPSKKFKVLGNTDRHSIKKNLIGALLFDSGETAEATRLKRTARRRYTRRKNRICYLQEIFSNEIAKVDDSFFHRLEESFLVEEDKKHERHPIFGNIVDEVAYHEKYPTIYHLRKKLADSTDKADLRLIYLALAHMIKFRGHFLIEGDLNPDNSDVDKLFIQLVQTYNQLFEENINASRVDAKAILSARLSKSRRLENLIAQLPGEKRNGLFGNLIALSLGLTPNFKSNFDLAEDAKLQLSKDTYDDDLDNLLAQIGDQYADLFLAAKNLSDAILLSDILRVNTEITKAPLSASMIKRYDEHHQDLTLLKALVRQQLPEKYKEIFFDQSKNGYAGYIDGGASQEEFYKFIKPILEKMDGTEELLAKLNREDLLRKQRTFDNGSIPHQIHLGELHAILRRQEDFYPFLKDNREKIEKILTFRIPYYVGPLARGNSRFAWMTRKSEETITPWNFEEVVDKGASAQSFIERMTNFDKNLPNEKVLPKHSLLYEYFTVYNELTKVKYVTEGMRKPAFLSGEQKKAIVDLLFKTNRKVTVKQLKEDYFKKIECFDSVEISGVEDRFNASLGTYHDLLKIIKDKDFLDNEENEDILEDIVLTLTLFEDREMIEERLKTYAHLFDDKVMKQLKRRRYTGWGRLSRKLINGIRDKQSGKTILDFLKDGFANRNFMQLIHDDSLTFKEDLQKAQVSGQGDSLHEHIANLAGSPAIKKGILQTVKVVDELVKVMGRHKPENIVIEMARENQTTQKGQKNSRERMKRIEEGIKELGSDILKEYPVETTQLQNEKLYLYYLQNGRDMYVDQELDINRLSDYDVDHIVPQSFLKDDSIDNKVLTRSDKNRGKSDNVPSEEVVKKMKNYWKQLLNAKLITQRKFDNLTKAERGGLSELDKAGFIKRQLVETRQITKHVAQILDSRMNTKYDENDKLIREVRVITLKSKLVSDFRKDFQFYKVREINNYHHAHDAYLNAVVGTALIKKYPKLESEFVYGDYKVYDISEQEIGKATAKYFFYSNIMNFFKTEITLANGEIRKRPLIETNGETGEIVWDKGRDFATVRKVLSMPQVNIVKKTEVQTGGFSKESILPKRNSDKLIARKKDWDPKKYGGFDSPTVAYSVLVVAKVEKGKSKKLKSVKELVGITIMERSSFEKDPVDFLEAKGYKEVRKDLIIKLPKYSLFELENGRKRMLASGELQKGNELALPSKYVNFLYLASHYEKLKGSPEDNEQKQLFVEQHKHYLDEIIEQISEFSKRVILADANLDKVLSAYNKHRDKPIREQAENIIHLFTLTNLGAPAAFKCFDTTIGRNRYKSIKEVLDATLIHQSITGLYETRIDLSQLGGD

SEQ ID NO: 22 - protein, 1358 aa, Streptococcus pyogenes
MDKKYSIGLDIGTNSVGWAVITDDYKVPSKKFKVLGNTDRHSIKKNLIGALLFGSGETAEATRLKRTARRRYTRRKNRICYLQEIFSNEMAKVDDSFFHRLEESFLVEEDKKHERHPIFGNIVDEVAYHEKYPTIYHLRKKLADSTDKADLRLIYLALAHMIKFRGHFLIEGDLNPDNSDVDKLFIQLVQIYNQLFEENINASRVDAKAILSARLSKSRRLENLIAQLPGEKRNGLFGNLIALSLGLTPNFKSNFDLAEDAKLQLSKDTYDDDLDNLLAQIGDQYADLFLAAKNLSDAILLSDILRVNSEITKAPLSASMIKRYDEHHQDLTLLKALVRQQLPEKYKEIFFDQSKNGYAGYIDGGASQEEFYKFIKPILEKMDGTEELLVKLNREDLLRKQRTFDNGSIPHQIHLGELHAILRRQEDFYPFLKDNREKIEKILTFRIPYYVGPLARGNSRFAWMTRKSEETITPWNFEEVVDKGASAQSFIERMTNFDKNLPNEKVLPKHSLLYEYFTVYNELTKVKYVTEGMRKPAFLSGEQKKAIVDLLFKTNRKVTVKQLKEDYFKKIECFDSVEISGVEDRFNASLGAYHDLLKIIKDKDFLDNEENEDILEDIVLTLTLFEDRGMIEERLKTYAHLFDDKVMKQLKRRRYTGWGRLSRKLINGIRDKQSGKTILDFLKDGFANRNFMQLIHDDSLTFKEDIQKAQVSGQGHSLHEQIANLAGSPAIKKGILQTVKIVDELVKVMGHKPENIVIEMARENQTTQKGQKNSRERMKRIEEGIKELGSQILKEHPVENTQLQNEKLYLYYLQNGRDMYVDQELDINRLSDYDVDHIVPQSFIKDDSIDNKVLTRSDKNRGKSDNVPSEEVVKKMKNYWRQLLNAKLITQRKFDNLTKAERGGLSELDKAGFIKRQLVETRQITKHVAQILDSRMNTKYDENDKLIREVKVITLKSKLVSDFRKDFQFYKVREINNYHHAHDAYLNAVVGTALIKKYPKLESEFVYGDYKVYDVSEQEIGKATAKYFFYSNIMNFFKTEITLANGEIRKRPLIETNGETGEIVWDKGRDFATVRKVLSMPQVNIVKKTEVQTGGFSKESILPKRNSDKLIARKKDWDPKKYGGFDSPTVAYSVLVVAKVEKGKSKKLKSVKELLGITIMERSSFEKNPIDFLEAKGYKEVKKDLIIKLPKYSLFELENGRKRMLASGELQKGNELALPSKYVNFLYLASHYEKLKGSPEDNEQKQLFVEQHKHYLDEIIEQISEFSKRVILADANLDKVLSAYNKHRDKPIREQAENIIHLFTLTNLGAPAAFKYFDTTIDRKRYTSTKEVLDATLIHQSITGLYETRIDLSQLGGD

SEQ ID NO: 23 - protein, 1359 aa, Streptococcus pyogenes
MDKKYSIGLDIGTNSVGWAVITDDYKVPSKKFKVLGNTDRHSIKKNLIGALLFDSGETAEATRLKRTARRRYTRRKNRICYLQEIFSNEMAKVDDSFFHRLEESFLVEEDKKHERHPIFGNIVDEVAYHEKYPTIYHLRKKLVDSTDKADLRLIYLALAHMIKFRGHFLIEGDLNPDNSDVDKLFIQLVQTYNQLFEENINASGVDAKAILSARLSKSRRLENLIAQLPGEKKNGLFGNLIALSLGLTPNFKSNFDLAEDAKLQLSKDTYDDDLDNLLAQIGDQYADLFLAAKNLSDAILLSDILRLNSEITKAPLSASMIKRYDEHHQDLTLLKALVRQQLPEKYKEIFFDQSKNGYAGYIDGGASQEEFYKFIKPILEKMDGTEELLAKLNREDLLRKQRTFDNGSIPHQIHLGELHAILRRQEDFYPFLKDNREKIEKILTFRIPYYVGPLARGNSRFAWMTRKSEETITPWNFEEVVDKGASAQSFIERMTNFDKNLPNEKVLPKHSLLYEYFTVYNELTKVKYVTEGMRKPAFLSGEQKKAIVDLLFKTNRKVTVKQLKEDYFKKIECFDSVEISGVEDRFNASLGTYHDLLKIIKDKDFLDNEENEDILEDIVLTLTLFEDREMIEERLKTYAHLFDDKVMKQLKRRRYTGWGRLSRKLINGIRDKQSGKTILDFLKDGFANRNFMQLIHDDSLTFKEDIQKAQVSGQGDSLHEHIANLAGSPAIKKGILQTVKVVDELVKVMGRHKPENIVIEMARENQTTQKGQKNSRERMKRIEEGIKELGSQILKEHPVENTQLQNEKLYLYYLQNGRDMYVDQELDINRLSDYDVDHIVPQSFIKDDSIDNKVLTRSDKNRGKSDNVPSEEVVKKMKNYWRQLLNAKLITQRKFDNLTKAERGGLSELDKAGFIKRQLVETRQITKHVAQILDSRMNTKYDENDKLIREVKVITLKSKLVSDFRKDFQFYKVREINNYHHAHDAYLNAVVGTALIKKYPKLESEFVYGDYKVYDVSEQEIGKATAKYFFYSNIMNFFKTEITLANGEIRKRPLIETNGETGEIVWDKGRDFATVRKVLSMPQVNIVKKTEVQTGGFSKESILPKRNSDKLIARKKDWDPKKYGGFDSPTVAYSVLVVAKVEKGKSKKLKSVKELLGLTIMERSSFEKNPIDFLEAKGYKEVKKDLIIKLPKYSLFELENGRKRMLASGELQKGNELALPSKYVNFLYLASHYEKLKGSPEDNEQKQLFVEQHKHYLDEIIEQISEFSKRVILADANLDKVLSAYNKHRDKPIREQAENIIHLFTLTNLGAPAAFKYFDTTIDRKRYTSTKEVLDATLIHQSITGLYETRIDLSQLGGD

SEQ ID NO: 24 - protein, 1358 aa, Streptococcus pyogenes
MDKKYSIGLDIGTNSVGWAVITDDYKVPSKKLKVLGNTDRHGIKKNLIGALLFDSGETAEATRLKRTARRRYTRRKNRICYLQEIFSNEMAKVDDSFFHRLEESFLVEEDKKHERHPIFGNIVDEVAYHEKYPTIYHLRKKLADSTDKVDLRLIYLALAHMIKFRGHFLIEGDLNPDNSDVDKLFIQLVQTYNQLFEENINASRVDAKAILSARLSKSRRLENLIAQLPGEKKNGLFGNLIALSLGLTPNFKSNFDLAEDAKLQLSKDTYDDDLDNLLAQIGDQYADLFLAAKNLSDAILLSDILRVNSEITKAPLSASMIKRYDEHHQDLTLLKALVRQQLPEKYKEIFFDQSKNGYAGYIDGGASQEEFYKFIKPILEKMDGTEELLAKLNREDLLRKQRTFDNGSIPYQIHLGELHAILRRQEDFYPFLKDNREKIEKILTFRIPYYVGPLARGNSRFAWMTRKSEETITPWNFEEVVDKGASAQSFIERMTNFDKNLPNEKVLPKHSLLYEYFTVYNELTKVKYVTEGMRKPAFLSGEQKKAIVDLLFKTNRKVTVKQLKEDYFKKIECFDSVEISGVEDRFNTSLGTYHDLLKIIKDKDFLDNEENEDILEDIVLTLTLFEDKEMIEERLKKYANLFDDKVMKQLKRRHYTGWGRLSRKLINGIRDKQSGKTILDFLKDGFANRNFMQLINDDSLTFKEAIQKAQVSGQGHSLHEQIANLAGSPAIKKGILQTVKIVDELVKVMGHKPENIVIEMARENQTTQKGQKNSRERMKRIEEGIKELGSQILKEHPVENTQLQNEKLYLYYLQNGRDMYVDQELDINRLSDYDVDHIVPQSFLKDDSIDNKVLTRSDKNRGKSDNVPSEEVVKKMKNYWRQLLNAKLITQRKFDNLTKAERGGLSELDKAGFIKRQLVETRQITKHVAQILDSRMNTKYDENDKLIREVKVITLKSKLVSDFRKDFQFYKVREINNYHHAHDAYLNAVVGTALIKKYPKLESEFVYGDYKVYDVSEQEIGKATAKYFFYSNIMNFFKTEITLANGEIRKRPLIETNGETGEIVWDKGRDFATVRKVLSMPQVNIVKKTEVQTGGFSKESILPKRNSDKLIARKKDWDPKKYGGFDSPTVAYSVLVVAKVEKGKSKKLKSVKELLGITIMERSSFEKNPIDFLEAKGYKEVRKDLIIKLPKYSLFELENGRKRMLASGELQKGNELALPSKYVNFLYLASHYEKLKGSPEDNEQKQLFVEQHKHYLDEIIEQISEFSKRVILADANLDKVLSAYNKHRDKPIREQAKNIIHLFTLTNLGAPAAFKYFDTTIERNRYKSIKEVLDATLIHQSITGLYETRIDLSQLGGD

SEQ ID NO: 25 - protein, 1358 aa, Streptococcus pyogenes
MDKKYSIGLDIGTNSVGWAVITDDYKVPSKKLKVLGNTDRHGIKKNLIGALLFDSGETAEATRLKRTARRRYTRRKNRICYLQEIFSNEMAKVDDSFFHRLEESFLVEEDKKHERHPIFGNIVDEVAYHEKYPTIYHLRKKLADSTDKVDLRLIYLALAHMIKFRGHFLIEGDLNPDNSDVDKLFIQLVQTYNQLFEENINASRVDAKAILSARLSKSRRLENLIAQLPGEKKNGLFGNLIALSLGLTPNFKSNFDLAEDAKLQLSKDTYDDDLDNLLAQIGDQYADLFLAAKNLSDAILLSDILRVNSEITKAPLSASMIKRYDEHHQDLTLLKALVRQQLPEKYKEIFFDQSKNGYAGYIDGGASQEEFYKFIKPILEKMDGTEELLAKLNREDLLRKQRTFDNGSIPYQIHLGELHAILRRQEDFYPFLKDNREKIEKILTFRIPYYVGPLARGNSRFAWMTRKSEETITPWNFEEVVDKGASAQSFIERMTNFDKNLPNEKVLPKHSLLYEYFTVYNELTKVKYVTEGMRKPAFLSGEQKKAIVDLLFKTNRKVTVKQLKEDYFKKIECFDSVEISGVEDRFNTSLGTYHDLLKIIKDKDFLDNEENEDILEDIVLTLTLFEDKEMIEERLKKYANLFDDKVMKQLKRRHYTGWGRLSRKLINGIRDKQSGKTILDFLKDGFANRNFMQLINDDSLTFKEAIQKAQVSGQGHSLHEQIANLAGSPAIKKGILQTVKIVDELVKVMGHKPENIVIEMARENQTTQKGQKNSRERMKRIEEGIKELGSQILKEHPVENTQLQNEKLYLYYLQNGRDMYVDQELDINRLSDYDVDHIVPQSFLKDDSIDNKVLTRSDKNRGKSDNVPSEEVVKKMKNYWRQLLNAKLITQRKFDNLTKAERGGLSELDKAGFIKRQLVETRQITKHVAQILDSRMNTKYDENDKLIREVKVITLKSKLVSDFRKDFQFYKVREINNYHHAHDAYLNAVVGTALIKKYPKLESEFVYGDYKVYDVSEQEIGKATAKYFFYSNIMNFFKTEITLANGEIRKRPLIETNGETGEIVWDKGRDFATVRKVLSMPQVNIVKKTEVQTGGFSKESILPKRNSDKLIARKKDWDPKKYGGFDSPTVAYSVLVVAKVEKGKSKKLKSVKELLGITIMERSSFEKNPIDFLEAKGYKEVRKDLIIKLPKYSLFELENGRKRMLASGELQKGNELALPSKYVNFLYLASHYEKLKGSPEDNEQKQLFVEQHKHYLDEIIEQISEFSKRVILADANLDKVLSAYNKHRDKPIREQAKNIIHLFTLTNLGAPAAFKYFDTTIERNRYKSIKEVLDATLIHQSITGLYEIRIDLSQLGGD

SEQ ID NO: 26 - protein, 1359 aa, Streptococcus pyogenes
MDKKYSIGLDIGTNSVGWAVITDDYKVPSKKFKVLGNTDRHSIKKNLIGALLFDSGETAEATRLKRTARRRYTRRKNRICYLQEIFSNEMAKVDDSFFHRLEESFLVEEDKKHERHPIFGNIVDEVAYHEKYPTIYHLRKKLVDSTDKADLRLIYLALAHMIKFRGHFLIEGDLNPDNSDVDKLFIQLVQTYNQLFEENINASGVDAKAILSARLSKSRRLENLIAQLPGEKKNGLFGNLIALSLGLTPNFKSNFDLAEDAKLQLSKDTYDDDLDNLLAQIGDQYADLFLAAKNLSDAILLSDILRVNTEITKASLSASMIKRYDEHHQDLTLLKALVRQQLPEKYKEIFFDQSKNGYAGYIDGGASQEEFYKFIKPILEKMDGTEELLVKLNREDLLRKQRTFDNGSIPHQIHLGELHAILRRQEDFYPFLKDNREKIEKILTFRIPYYVGPLARGNSRFAWMTRKSEETITPWNFEEVVDKGASAQSFIERMTNFDKNLPNEKVLPKHSLLYEYFTVYNELTKVKYVTEGMRKPAFLSGEQKKAIVDLLFKTNRKVTVKQLKEDYFKKIECFDSVEISGVEDRFNASLGTYHDLLKIIKDKDFLDNEENEDILEDIVLTLTLFEDREMIEERLKTYAHLFDDKVMKQLKRRRYTGWGRLSRKLINGIRDKQSGKTILDFLKDGFANRNFMQLIHDDSLTFKEDLQKAQVSGQGDSLHEHIANLAGSPAIKKGILQTVKVVDELVKVMGRHKPENIVIEMARENQTTQKGQKNSRERMKRIEEGIKELGSDILKEYPVENTQLQNEKLYLYYLQNGRDMYVDQELDINRLSDYDVDHIVPQSFIKDDSIDNKVLTRSDKNRGKSDNVPSEEVVKKMKNYWRQLLNAKLITQRKFDNLTKAERGGLSELDKAGFIKRQLVETRQITKHVAQILDSRMNTKYDENDKLIREVKVITLKSKLVSDFRKDFQFYKVREINNYHHAHDAYLNAVVGTALIKKYPKLESEFVYGDYKVYDVSEQEIGKATAKYFFYSNIMNFFKTEITLANGEIRKRPLIETNGETGEIVWDKGRDFATVRKVLSMPQVNIVKKTEVQTGGFSKESILPKRNSDKLIARKKDWDPKKYGGFDSPTVAYSVLVVAKVEKGKSKKLKSVKELLGITIMERSSFEKNPIDFLEAKGYKEVRKDLIIKLPKYSLFELENGRKRMLASGELQKGNELALPSKYVNFLYLASHYEKLKGSPEDNEQKQLFVEQHKHYLDEIIEQISEFSKRVILADANLDKVLSAYNKHRDKPIREQAENIIHLFTLTNLGAPAAFKYFDTTIGRNRYKSIKEVLDATLIHQSITGLYETRIDLSQLGGD

SEQ ID NO: 27 - protein, 1359 aa, Streptococcus pyogenes
MDKKYSIGLDIGTNSVGWAVITDDYKVPSKKFKVLGNTDRHGIKKNLIGALLFDSGETAEATRLKRTARRRYTRRKNRICYLQEIFSNEMAKVDDSFFHRLEESFLVEEDKKHERHPIFGNIVDEVAYHEKYPTIYHLRKKLADSTDKVDLRLIYLALAHMIKFRGHFLIEGDLNPDNSDVDKLFIQLVQTYNQLFEENINASRVDAKAILSARLSKSRRLENLIAQLPGEKKNGLFGNLIALSLGLTPNFKSNFDLAEDAKLQLSKDTYDDDLDNLLAQIGDQYADLFLAAKNLSDATLLSDILRVNSEITKAPLSASMIKRYDEHHQDLTLLKALVRQQLPEKYKEIFFDQSKNGYAGYIDGGASQEEFYKFIKPILEKMDGTEELLAKLNREDLLRKQRTFDNGSIPYQIHLGELHAILRRQEDFYPFLKDNREKIEKILTFRIPYYVGPLARGNSRFAWMTRKSEETITPWNFEEVVDKGASAQSFIERMTNFDKNLPNEKVLPKHSLLYEYFTVYNELTKVKYVTEGMRKPAFLSGEQKKAIVDLLFKTNRKVTVKQLKEDYFKKIECFDSVEISGVEDRFNASLGTYHDLLKIIKDKDFLDNEENEDILEDIVLTLTLFEDREMIEERLKTYAHLFDDKVMKQLKRRRYTGWGRLSRKLINGIRDKQSGKTILDFLKDGFANRNFMQLIHDDSLTFKEDIQKAQVSGQGDSLHEHIANLAGSPAIKKGILQTVKVVDELVKVMGRHKPENIVIEMARENQTTQKGQKNSRERMKRIEEGIKELGSDILKEYPVENTQLQNEKLYLYYLQNGRDMYVDQELDINRLSDYDVDHIVPQSFLKDDSIDNKVLTRSDKNRGKSDNVPSEEVVKKMKNYWRQLLNAKLITQRKFDNLTKAERGGLSELDKAGFIKRQLVETRQITKHVAQILDSRMNTKYDENDKLIREVKVITLKSKLVSDFRKDFQFYKVREINNYHHAHDAYLNAVVGTALIKKYPKLESEFVYGDYKVYDVSEQEIGKATAKYFFYSNIMNFFKTEITLANGEIRKRPLIETNGETGEIVWDKGRDFATVRKVLSMPQVNIVKKTEVQTGGFSKESILPKRNSDKLIARKKDWDPKKYGGFDSPTVAYSVLVVAKVEKGKSKKLKSVKELLGITIMERSSFEKNPIDFLEAKGYKEVRKDLIIKLPKYSLFELENGRKRMLASGELQKGNELALPSKYVNFLYLASHYEKLKGSPEDNEQKQLFVEQHKHYLDEIIEQISEFSKRVILADANLDKVLSAYNKHRDKPIREQAENIIHLFTLTNLGAPAAFKYFDTTIDRKRYTSTKEVLDATLIHQSITGLYETRIDLSQLGGD

SEQ ID NO: 28 - protein, 1359 aa, Streptococcus pyogenes
MDKKYSIGLDIGTNSVGWAVITDDYKVPSKKFKVLGNTDRHSIKKNLIGALLFDSGETAEATRLKRTARRRYTRRKNRICYLQEIFSNEMAKVDDSFFHRLEESFLVEEDKKHERHPIFGNIVDEVAYHEKYPTIYHLRKKLADSTDKADLRLIYLALAHMIKFRGHFLIEGDLNPDNSDVDKLFIQLVQTYNQLFEENINASRVDAKAILSARLSKSRRLENLIAQLPGEKRNGLFGNLIALSLGLTPNFKSNFDLAEDAKLQLSKDTYDDDLDNLLAQIGDQYADLFLAAKNLSDAILLSDILRVNSEITKAPLSASMIKRYDEHHQDLTLLKALVRQQLPEKYKEIFFDQSKNGYAGYIDGGASQEEFYKFIKPILEKMDGTEELLAKLNREDLLRKQRTFDNGSIPHQIHLGELHAILRRQEDFYPFLKDNREKIEKILTFRIPYYVGPLARGNSRFAWMTRKSEETITPWNFEEVVDKGASAQSFIERMTNFDKNLPNEKVLPKHSLLYEYFTVYNELTKVKYVTEGMRKPEFLSGEQKKAIVDLLFKTNRKVTVKQLKEDYFKKIECFDSVEISGVEDRFNASLGTYHDLLKIIKDKDFLDNEENEDILEDIVLTLTLFEDREMIEERLKTYAHLFDDKVMKQLKRRRYTGWGRLSRKLINGIRDKQSGKTILDFLKDGFANRNFMQLIHDDSLTFKEDIQKAQVSGQGDSLHEHIANLAGSPAIKKGILQTVKVVDELVKVMGRHKPENIVIEMARENQTTQKGQKNSRERMKRIEEGIKELGSDILKEYPVENTQLQNEKLYLYYLQNGRDMYVDQELDINRLSDYDVDHIVPQSFIKDDSIDNKVLTRSDKNRGKSDNVPSEEVVKKMKNYWKQLLNAKLITQRKFDNLTKAERGGLSELDKAGFIKRQLVETRQITKHVAQILDSRMNTKYDENDKLIREVKVITLKSKLVSDFRKDFQFYKVREINNYHHAHDAYLNAVVGTALIKKYPKLESEFVYGDYKVYDVSEQEIGKATAKYFFYSNIMNFFKTEITLANGEIRKRPLIETNGETGEIVWDKGRDFATVRKVLSMPQVNIVKKTEVQTGGFSKESILPKRNSDKLIARKKDWDPKKYGGFDSPTVAYSVLVVAKVEKGKSKKLKSVKELLGITIMERSSFEKNPIDFLEAKGYKEVRKDLIIKLPKYSLFELENGRKRMLASGELQKGNELALPSKYVNFLYLASHYEKLKGSPEDNEQKQLFVEQHKHYLDEIIEQISEFSKRVILADANLDKVLSAYNKHRDKPIREQAENIIHLFTLTNFGAPAAFIYFDTTIGRNRYKSIKEVLDATLIHQSITGLYETRIDLSQLGGD

SEQ ID NO: 29 - protein, 1359 aa, Streptococcus pyogenes
MDKKYSIGLDIGTNSVGWAVITDDYKVPSKKFKVLGNTDRHSIKKNLIGALLFDSGETAEATRLKRTARRRYTRRKNRICYLQEIFSNEIAKVDDSFFHRLEESFLVEEDKKHERHPIFGNIVDEVAYHEKYPTIYHLRKKLADSTDKADLRLIYLALAHMIKFRGHFLIEGDLNPDNSDVDKLFIQLVQTYNQLFEENINASRVDAKAILSARLSKSRRLENLIAQLPGEKRNGLFGNLIALSLGLTPNFKSNFDLAEDAKLQLSKDTYDDDLDNLLAQIGDQYADLFLAAKNLSDAILLSDILRVNTEITKAPLSASMIKRYDEHHQDLTLLKALVRQQLPEKYKEIFFDQSKNGYAGYIDGGASQEEFYKFIKPILEKMDGTEELLAKLNREDLLRKQRTFDNGSIPHQIHLGELHAILRRQEDFYPFLKDNREKIEKILTFRIPYYVGPLARGNSRFAWMTRKSEETITPWNFEEVVDKGASAQSFIERMTNFDKNLPNEKVLPKHSLLYEYFTVYNELTKVKYVTEGMRKPAFLSGEQKKAIVDLLFKTNRKVTVKQLKEDYFKKIECFDSVEISGVEDRFNASLGTYHDLLKIIKDKDFLDNEENEDILEDIVLTLTLFEDREMIEERLKTYAHLFDDKVMKQLKRRRYTGWGRLSRKLINGIRDKQSGKTILDFLKDGFANRNFMQLIHDDSLTFKEDLQKAQVSGQGDSLHEHIANLAGSPAIKKGILQTVKVVDELVKVMGRHKPENIVIEMARENQTTQKGQKNSRERMKRIEEGIKELGSDILKEYPVENTQLQNEKLYLYYLQNGRDMYVDQELDINRLSDYDVDHIVPQSFLKDDSIDNKVLTRSDKNRGKSDNVPSEEVVKKMKNYWKQLLNAKLITQRKFDNLTKAERGGLSELDKAGFIKRQLVETRQITKHVAQILDSRMNTKYDENDKLIREVRVITLKSKLVSDFRKDFQFYKVREINNYHHAHDAYLNAVVGTALIKKYPKLESEFVYGDYKVYDISEQEIGKATAKYFFYSNIMNFFKTEITLANGEIRKRPLIETNGETGEIVWDKGRDFATVRKVLSMPQVNIVKKTEVQTGGFSKESILPKRNSDKLIARKKDWDPKKYGGFDSPTVAYSVLVVAKVEKGKSKKLKSVKELVGITIMERSSFEKDPVDFLEAKGYKEVRKDLIIKLPKYSLFELENGRKRMLASGELQKGNELALPSKYVNFLYLASHYEKLKGSPEDNEQKQLFVEQHKHYLDEIIEQISEFSKRVILADANLDKVLSAYNKHRDKPIREQAENIIHLFTLTNLGAPAAFKYFDTTIGRNRYKSIKEVLDATLIHQSITGLYETRIDLSQLGGD

SEQ ID NO: 30 - protein, 1359 aa, Streptococcus pyogenes
MDKKYSIGLDIGTNSVGWAVITDDYKVPSKKFKVLGNTDRHSIKKNLIGALLFDSGETAEATRLKRTARRRYTRRKNRICYLQEIFSNEIAKVDDSFFHRLEESFLVEEDKKHERHPIFGNIVDEVAYHEKYPTIYHLRKKLADSTDKADLRLIYLALAHMIKFRGHFLIEGGLNPDNSDVDKLFIQLVQTYNQLFEENINASRVDAKAILSARLSKSRRLENLIAQLPGEKRNGLFGNLIALSLGLTPNFKSNFDLAEDAKLQLSKDTYDDDLDNLLAQIGDQYADLFLAAKNLSDAILLSDILRVNTEITKAPLSASMIKRYDEHHQDLTLLKALVRQQLPEKYKEIFFDQSKNGYAGYIDGGASQEEFYKFIKPILEKMDGTEELLAKLNREDLLRKQRTFDNGSIPHQIHLGELHAILRRQEDFYPFLKDNREKIEKILTFRIPYYVGPLARGNSRFAWMTRKSEETITPWNFEEVVDKGASAQSFIERMTNFDKNLPNEKVLPKHSLLYEYFTVYNELTKVKYVTEGMRKPAFLSGEQKKAIVDLLFKTNRKVTVKQLKEDYFKKIECFDSVEISGVEDRFNASLGTYHDLLKIIKDKDFLDNEENEDILEDIVLTLTLFEDREMIEERLKTYAHLFDDKVMKQLKRRRYTGWGRLSRKLINGIRDKQSGKTILDFLKDGFANRNFMQLIHDDSLTFKEDLQKAQVSGQGDSLHEHIANLAGSPAIKKGILQTVKVVDELVKVMGRHKPENIVIEMARENQTTQKGQKNSRERMKRIEEGIKELGSDILKEYPVENTQLQNEKLYLYYLQNGRDMYVDQELDINRLSDYDVDHIVPQSFLKDDSIDNKVLTRSDKNRGKSDNVPSEEVVKKMKNYWKQLLNAKLITQRKFDNLTKAERGGLSELDKAGFIKRQLVETRQITKHVAQILDSRMNTKYDENDKLIREVRVITLKSKLVSDFRKDFQFYKVREINNYHHAHDAYLNAVVGTALIKKYPKLESEFVYGDYKVYDISEQEIGKATAKYFFYSNIMNFFKTEITLANGEIRKRPLIETNGETGEIVWDKGRDFATVRKVLSMPQVNIVKKTEVQTGGFSKESILPKRNSDKLIARKKDWDPKKYGGFDSPTVAYSVLVVAKVEKGKSKKLKSVKELVGITIMERSSFEKDPVDFLEAKGYKEVRKDLIIKLPKYSLFELENGRKRMLASGELQKGNELALPSKYVNFLYLASHYEKLKGSPEDNEQKQLFVEQHKHYLDEIIEQISEFSKRVILADANLDKVLSAYNKHRDKPIREQAENIIHLFTLTNLGAPAAFKYFDTTIGRNRYKSIKEVLDATLIHQSITGLYETRIDLSQLGGD

SEQ ID NO: 31 - protein, 1359 aa, Streptococcus pyogenes
MDKKYSIGLDIGTNSVGWAVITDDYKVPSKKFKVLGNTDRHSIKKNLIGALLFDSGETAEATRLKRTARRRYTRRKNRICYLQEIFSNEMAKVDDSFFHRLEESFLVEEDKKHERHPIFGNIVDEVAYHEKYPTIYHLRKKLVDSTDKADLRLIYLALAHMIKFRGHFLIEGDLNPDNSDVDKLFIQLVQTYNQLFEENINANGVDAKAILSARLSKSRRLENLIAQLPGEKKNGLFGNLIALSLGLTPNFKSNFDLAEDAKLQLSKDTYDDDLDNLLAQIGDQYADLFLAAKNLSDAILLSDILRVNTEITKAPLSASMIKRYDEHHQDLTLLKALVRQQLPEKYKEIFFDQSKNGYAGYIDGGASQEEFYKFIKPILEKMDGTEELLVKLNREDLLRKQRTFDNGSIPHQIHLGELHAILRRQEDFYPFLKDNREKIEKILTFRIPYYVGPLARGNSRFAWMTRKSEETITPWNFEEVVDKGASAQSFIERMTNFDKNLPNEKVLPKHSLLYEYFTVYNELTKVKYVTEGMRKPAFLSGEQKKAIVDLLFKTNRKVTVKQLKEDYFKKIECFDSVEISGVEDRFNASLGTYHDLLKIIKDKDFLDNEENEDILEDIVLTLTLFEDREMIEERLKTYAHLFDDKVMKQLKRRRYTGWGRLSRKLINGIRDKQSGKTILDFLKDGFANRNFMQLIHDDSLTFKEDIQKAQVSGQGDSLHEHIANLAGSPAIKKGILQTVKVVDELVKVMGRHKPENIVIEMARENQTTQKGQKNSRERMKRIEEGIKELGSQILKEHPVENTQLQNEKLYLYYLQNGRDMYVDQELDINRLSDYDVDHIVPQSFLKDDSIDNKVLTRSDKNRGKSDNVPSEEVVKKMKNYWRQLLNAKLITQRKFDNLTKAERGGLSELDKAGFIKRQLVETRQITKHVAQILDSRMNTKYDENDKLIREVKVITLKSKLVSDFRKDFQFYKVREINNYHHAHDAYLNAVVGTALIKKYPKLESEFVYGDYKVYDVSEQEIGKATAKYFFYSNIMNFFKTEITLANGEIRKRPLIETNGETGEIVWDKGRDFATVRKVLSMPQVNIVKKTEVQTGGFSKESILPKRNSDKLIARKKDWDPKKYGGFDSPTVAYSVLVVAKVEKGKSKKLKSVKELLGITIMERSSFEKNPIDFLEAKGYKEVKKDLIIKLPKYSLFELENGRKRMLASGELQKGNELALPSKYVNFLYLASHYEKLKGSPEDNEQKQLFVEQHKHYLDEIIEQISEFSKRVILADANLDKVLSAYNKHRDKPIREQAENIIHLFTLTNLGAPAAFKYFDTTIDRKRYTSTKEVLDATLIHQSITGLYETRIDLSQLGGD

SEQ ID NO: 32 - protein, 1359 aa, Streptococcus pyogenes
MDKKYSIGLDIGTNSVGWAVITDDYKVPSKKFKVLGNTDRHSIKKNLIGALLFDSGETAEATRLKRTARRRYTRRKNRICYLQEIFSNEMAKVDDSFFHRLEESFLVEEDKKHERHPIFGNIVDEVAYHEKYPTIYHLRKKLADSTDKADLRLIYLALAHMIKFRGHFLIEGDLNPDNSDVDKLFIQLVQTYNQLFEENINASRVDAKAILSARLSKSRRLENLIAQLPGEKKNGLFGNLIALLLGLTPNFKSNFDLAEDAKLQLSKDTYDDDLDNLLAQIGDQYADLFLAAKNLSDAILLSDILRVNSEITKAPLSASMIKRYDEHHQDLTLLKALVRQQLPEKYKEIFFDQSKNGYAGYIDGGASQEEFYKFIKPILEKMDGTEELLAKLNREDLLRKQRTFDNGSIPHQIHLGELHAILRRQEDFYPFLKDNREKIEKILTFRIPYYVGPLARGNSRFAWMTRKSEETITPWNFEEVVDKGASAQSFIERMTNFDKNLPNEKVLPKHSLLYEYFTVYNELTKVKYVTEGMRKPAFLSGEQKKAIVDLLFKTNRKVTVKQLKEDYFKKIECFDSVEISGVEDRFNASLGTYHDLLKIIKDKDFLDNEENEDILEDIVLTLTLFEDKEMIEERLKKYAHLFDDKVMKQLKRRRYTGWGRLSRKLINGIRDKQSGKTILDFLKDGFANRNFMQLIHDDSLTFKEDIQKAQVSGQGDSLHEHIANLAGSPAIKKGILQTVKVVDELVKVMGRHKPENIVIEMARENQTTQKGQKNSRERMKRIEEGIKELGSDILKEYPVENTQLQNEKLYLYYLQNGRDMYVDQELDINRLSDYDVDHIVPQSFLKDDSIDNKVLTRSDKNRGKSDNVPSEEVVKKMKNYWKQLLNAKLITQRKFDNLTKAERGGLSELDKAGFIKRQLVETRQITKHVAQILDSRMNTKYDENDKLIREVRVITLKSKLVSDFRKDFQFYKVREINNYHHAHDAYLNAVVGTALIKKYPKLESEFVYGDYKVYDVSEQEIGKATAKYFFYSNIMNFFKTEITLANGEIRKRPLIETNGETGEIVWDKGRDFATVRKVLSMPQVNIVKKTEVQTGGFSKESILPKRNSDKLIARKKDWDPKKYGGFDSPTVAYSVLVVAKVEKGKSKKLKSVKELLGITIMERSSFEKNPIDFLEAKGYKEVRKDLIIKLPKYSLFELENGRKRMLASGELQKGNELALPSKYVNFLYLASHYEKLKGSPEDNEQKQLFVEQHKHYLDEIIEQISEFSKRVILADANLDKVLSAYNKHRDKPIREQAENIIHLFTLTNLGAPAAFKYFDTTIDRKRYTSTKEVLDATLIHQSITGLYETRIDLSQLGGD

SEQ ID NO: 33 - protein, 1359 aa, Streptococcus pyogenes
MDKKYSIGLDIGTNSVGWAVITDDYKVPSKKFKVLGNTDRHSIKKNLIGALLFDSGEIAEATRLKRTARRRYTRRKNRICYLQEIFSNEMAKVDDSFFHRLEESFLVEEDKKHERHPIFGNIVDEVAYHEKYPTIYHLRKKLVDSTDKADLRLIYLALAHMIKFRGHFLIEGDLNPDNSDVDKLFIQLVQTYNQLFEENINASGVDAKAILSARLSKSRRLENLIAQLPGEKKNGLFGNLIALSLGLTPNFKSNFDLAEDAKLQLSKDTYDDDLDNLLAQIGDQYADLFLAAKNLSDAILLSDILRLNSEITKAPLSASMIKRYDEHHQDLTLLKALVRQQLPEKYKEIFFDQSKNGYAGYIDGGASQEEFYKFIKPILEKMDGTEELLAKLNRKDLLRKQRTFDNGSIPHQIHLGELHAILRRQEDFYPFLKDNREKIEKILTFRIPYYVGPLARGNSRFAWMTRKSEETITPWNFEEVVDKGASAQSFIERMTNFDKNLPNEKVLPKHSLLYEYFTVYNELTKVKYVTEGMRKPAFLSGEQKKAIVDLLFKTNRKVTVKQLKEDYFKKIECFDSVEISGVEDRFNASLGTYHDLLKIIKDKDFLDNEENEDILEDIVLTLTLFEDREMIEERLKTYAHLFDDKVMKQLKRRRYTGWGRLSRKLINGIRDKQSGKTILDFLKDGFANRNFMQLIHDDSLTFKEDIQKAQVSGQGDSLHEHIANLAGSPAIKKGILQTVKVVDELVKVMGRHKPENIVIEMARENQTTQKGQKNSRERMKRIEEGIKELGSQILKEHPVENTQLQNEKLYLYYLQNGRDMYVDQELDINRLSDYDVDHIVPQSFIKDDSIDNKVLTRSDKNRGKSDNVPSEEVVKKMKNYWRQLLNAKLITQRKFDNLTKAERGGLSELDKAGFIKRQLVETRQITKHVAQILDSRMNTKYDENDKLIREVKVITLKSKLVSDFRKDFQFYKVREINNYHHAHDAYLNAVVGTALIKKYPKLESEFVYGDYKVYDVSEQEIGKATAKYFFYSNIMNFFKTEITLANGEIRKRPLIETNGETGEIVWDKGRDFATVRKVLSMPQVNIVKKTEVQTGGFSKESILPKRNSDKLIARKKDWDPKKYGGFDSPTVAYSVLVVAKVEKGKSKKLKSVKELLGITIMERSSFEKNPIDFLEAKGYKEVRKDLIIKLPKYSLFELENGRKRMLASGELQKGNELALPSKYVNFLYLASHYEKLKGSPEDNEQKQLFVEQHKHYLDEIIEQISEFSKRVILADANLDKVLSAYNKHRDKPIREQAENIIHLFTLTNLGAPTAFKYFDTTIDRKRYTSTKEVLDATFIHQSITGLYETRIDLSQLGGD

SEQ ID NO: 34 - protein, 1184 aa, Streptococcus pyogenes
PDNSDVDKLFIQLVQTYNQLFEENINASGVDAKAILSARLSKSRRLENLIAQLPGEKKNGLFGNLIALSLGLTPNFKSNFDLAEDAKLQLSKDTYDDDLDNLLAQIGDQYADLFLAAKNLSDAILLSDILRVNTEITKAPLSASMIKRYDEHHQDLTLLKALVRQQLPEKYKEIFFDQSKNGYAGYIDGGASQEEFYKFIKPILEKMDGTEELLVKLNREDLLRKQRTFDNGSIPHQIHLGELHAILRRQEDFYPFLKDNREKIEKILTFRIPYYVGPLARGNSRFAWMTRKSEETITPWNFEEVVDKGASAQSFIERMTNFDKNLPNEKVLPKHSLLYEYFTVYNELTKVKYVTEGMRKPAFLSGEQKKAIVDLLFKTNRKVTVKQLKEDYFKKIECFDSVEISGVEDRFNASLGTYHDLLKIIKDKDFLDNEENEDILEDIVLTLTLFEDREMIEERLKTYAHLFDDKVMKQLKRRRYTGWGRLSRKLINGIRDKQSGKTILDFLKDGFANRNFMQLIHDDSLTFKEDIQKAQVSGQGDSLHEHIANLAGSPAIKKGILQTVKVVDELVKVMGRHKPENIVIEMARENQTTQKGQKNSRERMKRIEEGIKELGSQILKEHPVENTQLQNEKLYLYYLQNGRDMYVDQELDINRLSDYDVDHIVPQSFLKDDSIDNKVLTRSDKNRGKSDNVPSEEVVKKMKNYWRQLLNAKLITQRKFDNLTKAERGGLSELDKAGFIKRQLVETRQITKHVAQILDSRMNTKYDENDKLIREVKVITLKSKLVSDFRKDFQFYKVREINNYHHAHDAYLNAVVGTALIKKYPKLESEFVYGDYKVYDVSEQEIGKATAKYFFYSNIMNFFKTEITLANGEIRKRPLIETNGETGEIVWDKGRDFATVRKVLSMPQVNIVKKTEVQTGGFSKESILPKRNSDKLIARKKDWDPKKYGGFDSPTVAYSVLVVAKVEKGKSKKLKSVKELLGITIMERSSFEKNPIDFLEAKGYKEVKKDLIIKLPKYSLFELENGRKRMLASGELQKGNELALPSKYVNFLYLASHYEKLKGSPEDNEQKQLFVEQHKHYLDEIIEQISEFSKRVILADANLDKVLSAYNKHRDKPIREQAENIIHLFTLTNLGAPAAFKYFDTTIDRKRYTSTKEVLDATLIHQSITGLYETRIDLSQLGGD

SEQ ID NO: 35 - protein, 1359 aa, Streptococcus pyogenes
MDKKYSIGLDIGTNSVGWAVITDDYKVPSKKFKVLGNTDRHSIKKNLIGALLFDSGETAEATRLKRTARRRYTRRKNRICYLQEIFSNEMAKVDDSFFHRLEESFLVEEDKKHERHPIFGNIVDEVAYHEKYPTIYHLRKKLADSTDKADLRLIYLALAHMIKFRGHFLIEGDLNPDNSDVDKLFIQLVQTYNQLFEENINASRVDAKAILSARLSKSRRLENLIAQLPGEKKNGLFGNLIALSLGLTPNFKSNFDLAEDAKLQLSKDTYDDDLDNLLAQIGDQYADLFLAAKNLSDATLLSDILRVNSEITKAPLSASMIKRYDEHHQDLTLLKALVRQQLPEKYKEIFFDQSKNGYAGYIDGGASQEEFYKFIKPILEKMDGTEELLAKLNREDLLRKQRTFDNGSIPHQIHLGELHAILRRQEDFYPFLKDNREKIEKILTFRIPYYVGPLARGNSRFAWMTRKSEETITPWNFEEVVDKGASAQSFIERMTNFDKNLPNEKVLPKHSLLYEYFTVYNELTKVKYVTEGMRKPAFLSGEQKKAIVDLLFKTNRKVTVKQLKEDYFKKIECFDSVEISGVEDRFNASLGTYHDLLKIIKDKDFLDNEENEDILEDIVLTLTLFEDREMIEERLKTYAHLFDDKVMKQLKRRRYTGWGRLSRKLINGIRDKQSGKTILDFLKDGFANRNFMQLIHDDSLTFKEDIQKAQVSGQGDSLHEHIANLAGSPAIKKGILQTVKVVDELVKVMGRHKPENIVIEMARENQTTQKGQKNSRERMKRIEEGIKELGSDILKEYPVENTQLQNEKLYLYYLQNGRDMYVDQELDINRLSDYDVDHIVPQSFLKDDSIDNKVLTRSDKNRGKSDNVPSEEVVKKMKNYWRQLLNAKLITQRKFDNLTKAERGGLSELDKAGFIKRQLVETRQITKHVAQILDSRMNTKYDENDKLIREVKVITLKSKLVSDFRKDFQFYKVREINNYHHAHDAYLNAVVGTALIKKYPKLESEFVYGDYKVYDVSEQEIGKATAKYFFYSNIMNFFKTEITLANGEIRKRPLIETNGETGEIVWDKGRDFATVRKVLSMPQVNIVKKTEVQTGGFSKESILPKRNSDKLIARKKDWDPKKYGGFDSPTVAYSVLVVAKVEKGKSKKLKSVKELLGITIMERSSFEKNPIDFLEAKGYKEVRKDLIIKLPKYSLFELENGRKRMLASGELQKGNELALPSKYVNFLYLASHYEKLKGSPEDNEQKQLFVEQHKHYLDEIIEQISEFSKRVILADANLDKVLSAYNKHRDKPIREQAENIIHLFTLTNLGAPAAFKYFDTTIDRKRYTSTKEVLDATLIHQSITGLYETRIDLSQLGGD

SEQ ID NO: 36 - protein, 1358 aa, Streptococcus pyogenes
MDKKYSIGLDIGTNSVGWAVITDDYKVPSKKFKVLGNTDRHSIKKNLIGALLFDSGETAEATRLKRTARRRYTRRKNRICYLQEIFSNEMAKVDDSFFHRLEESFLVEEDKKHERHPIFGNIVDEVAYHEKYPTIYHLRKKLADSTDKVDLRLIYLALAHMIKFRGHFLIEGDLNPDNSDVDKLFIQLVQTYNQLFEENINASRVDAKAILSARLSKSRRLENLIAQLPGEKKNGLFGNLIALSLGLTPNFKSNFDLAEDTKLQLSKDTYDDDLDNLLAQIGDQYADLFLAAKNLSDAILLSDILRVNSEITKAPLSASMIKRYDEHHQDLTLLKALVRQQLPEKYKEIFFDQSKNGYAGYIDGGASQEEFYKFIKPILEKMDGTEELLAKLNREDLLRKQRTFDNGSIPYQIHLGELHAILRRQEDFYPFLKDNREKIEKILTFRIPYYVGPLARGNSRFAWMTRKSEETITPWNFEEVVDKGASAQSFIERMTNFDKNLPNEKVLPKHSLLYEYFTVYNELTKVKYVTEGMRKPAFLSGEQKKAIVDLLFKTNRKVTVKQLKEDYFKKIECFDSVEISGVEDRFNTSLGTYHDLLKIIKDKDFLDNEENEDILEDIVLTLTLFEDKEMIEERLKKYANLFDDKVMKQLKRRHYTGWGRLSRKLINGIRDKQSGKTILDFLKDGFANRNFMQLINDDSLTFKEAIQKAQVSGQGHSLHEQIANLAGSPAIKKGILQTVKIVDELVKVMGHKPENIVIEMARENQTTQKGQKNSRERMKRIEEGIKELGSQILKEHPVENTQLQNEKLYLYYLQNGRDMYVDQELDINRLSDYDVDHIVPQSFLKDDSIDNKVLTRSDKNRGKSDNVPSEEVVKKMKNYWRQLLNAKLITQRKFDNLTKAERGGLSELDKAGFIKRQLVETRQITKHVAQILDSRMNTKYDENDKLIREVKVITLKSKLVSDFRKDFQFYKVREINNYHHAHDAYLNAVVGTALIKKYPKLESEFVYGDYKVYDVSEQEIGKATAKYFFYSNIMNFFKTEITLANGEIRKRPLIETNGETGEIVWDKGRDFATVRKVLSMPQVNIVKKTEVQTGGFSKESILPKRNSDKLIARKKDWDPKKYGGFDSPTVAYSVLVVAKVEKGKSKKLKSVKELLGITIMERSSFEKNPIDFLEAKGYKEVRKDLIIKLPKYSLFELENGRKRMLASGELQKGNELALPSKYVNFLYLASHYEKLKGSPEDNEQKQLFVEQHKHYLDEIIEQISEFSKRVILADANLDKVLSAYNKHRDKPIREQAKNIIHLFTLTNLGAPAAFKYFDTTIERNRYKSIKEVLDATLIHQSITGLYETRIDLSQLGGD

SEQ ID NO: 37 - protein, 1359 aa, Streptococcus pyogenes
MDKKYSIGLDIGTNSVGWAVITDDYKVPSKKFKVLGNTDRHSIKKNLIGALLFDSGETAEATRLKRTARRRYTRRKNRICYLQEIFSNEMAKVDDSFFHRLEESFLVEEDKKHERHPIFGNIVDEVAYHEKYPTIYHLRKKLADSTDKADLRLIYLALAHMIKFRGHFLIEGDLNPDNSDVDKLFIQLVQTYNQLFEENINASRVDAKAILSARLSKSRRLENLIAQLPGEKRNGLFGNLIALSLGLTPNFKSNFDLAEDAKLQLSKDTYDDDLDNLLAQIGDQYADLFLAAKNLSDAILLSDILRVNSEITKAPLSASMIKRYDEHHQDLTLLKALVRQQLPEKYKEIFFDQSKNGYAGYIDGGASQEEFYKFIKPILEKMDGTEELLAKLNREDLLRKQRTFDNGSIPHQIHLGELHAILRRQEDFYPFLKDNREKIEKILTFRIPYYVGPLARGNSRFAWMTRKSEETITPWNFEEVVDKGASAQSFIERMTNFDKNLPNEKVLPKHSLLYEYFTVYNELTKVKYVTEGMRKPAFLSGEQKKAIVDLLFKTNRKVTVKQLKEDYFKKIECFDSVEISGVEDRFNASLGTYHDLLKIIKDKDFLDNEENEDILEDIVLTLTLFEDREMIEERLKTYAHLFDDKVMKQLKRRRYTGWGRLSRKLINGIRDKQSGKTILDFLKDGFANRNFMQLIHDDSLTFKEDIQKAQVSGQGDSLHEHIANLAGSPAIKKGILQTVKIVDELVKVMGRHKPENIVIEMARENQTTQKGQKNSRERMKRIEEGIKELGSDILKEYPVENTQLQNEKLYLYYLQNGRDMYVDQELDINRLSDYDVDHIVPQSFLKDDSIDNKVLTRSDKNRGKSDNVPSEEVVKKMKNYWKQLLNAKLITQRKFDNLTKAERGGLSELDKAGFIKRQLVETRQITKHVAQILDSRMNTKYDENDKLIREVKVITLKSKLVSDFRKDFQFYKVREINNYHHAHDAYLNAVVGTALIKKYPKLESEFVYGDYKVYDVSEQEIGKATAKYFFYSNIMNFFKTEITLANGEIRKRPLIETNGETGEIVWDKGRDFATVRKVLSMPQVNIVKKTEVQTGGFSKESILPKRNSDKLIARKKDWDPKKYGGFDSPTVAYSVLVVAKVEKGKSKKLKSVKELLGITIMERSSFEKNPIDFLEAKGYKEVRKDLIIKLPKYSLFELENGRKRMLASGELQKGNELALPSKYVNFLYLASHYEKLKGSPEDNEQKQLFVEQHKHYLDEIIEQISEFSKRVILADANLDKVLSAYNKHRDKPIREQAENIIHLFTLTNLGAPAAFKYFDTTIGRNRYKSIKEVLDATLIHQSITGLYETRIDLSQLGGD

SEQ ID NO: 38 - protein, 1270 aa, Streptococcus pyogenes
MAKVDDSFFHRLEESFLVEEDKKHERHPIFGNIVDEVAYHEKYPTIYHLRKKLVDSTDKADLRLIYLALAHMIKFRGHFLIEGDLNPDNSDVDKLFIQLVQTYNQLFEENINASGVDAKAILSARLSKSRRLENLIAQLPGEKKNGLFGNLIALSLGLTPNFKSNFDLAEDAKLQLSKDTYDDDLDNLLAQIGDQYADLFLAAKNLSDAILLSDILRVNTEITKAPLSASMIKRYDEHHQDLTLLKALVRQQLPEKYKEIFFDQSKNGYAGYIDGGASQEEFYKFIKPILEKMDGTEELLVKLNREDLLRKQRTFDNGSIPHQIHLGELHAILRRQEDFYPFLKDNREKIEKILTFRIPYYVGPLARGNSRFAWMTRKSEETITPWNFEEVVDKGASAQSFIERMTNFDKNLPNEKVLPKHSLLYEYFTVYNELTKVKYVTEGMRKPAFLSGEQKKAIVDLLFKTNRKVTVKQLKEDYFKKIECFDSVEISGVEDRFNASLGTYHDLLKIIKDKDFLDNEENEDILEDIVLTLTLFEDREMIEERLKTYAHLFDDKVMKQLKRRRYTGWGRLSRKLINGIRDKQSGKTILDFLKDGFANRNFMQLIHDDSLTFKEDIQKAQVSGQGDSLHEHIANLAGSPAIKKGILQTVKVVDELVKVMGRHKPENIVIEMARENQTTQKGQKNSRERMKRIEEGIKELGSQILKEHPVENTQLQNEKLYLYYLQNGRDMYVDQELDINRLSDYDVDHIVPQSFLKDDSIDNKVLTRSDKNRGKSDNVPSEEVVKKMKNYWRQLLNAKLITQRKFDNLTKAERGGLSELDKAGFIKRQLVETRQITKHVAQILDSRMNTKYDENDKLIREVKVITLKSKLVSDFRKDFQFYKVREINNYHHAHDAYLNAVVGTALIKKYPKLESEFVYGDYKVYDVSEQEIGKATAKYFFYSNIMNFFKTEITLANGEIRKRPLIETNGETGEIVWDKGRDFATVRKVLSMPQVNIVKKTEVQTGGFSKESILPKRNSDKLIARKKDWDPKKYGGFDSPTVAYSVLVVAKVEKGKSKKLKSVKELLGITIMERSSFEKNPIDFLEAKGYKEVKKDLIIKLPKYSLFELENGRKRMLASGELQKGNELALPSKYVNFLYLASHYEKLKGSPEDNEQKQLFVEQHKHYLDEIIEQISEFSKRVILADANLDKVLSAYNKHRDKPIREQAENIIHLFTLTNLGAPAAFKYFDTTIDRKRYTSTKEVLDATLIHQSITGLYETRIDLSQLGGD

SEQ ID NO: 39 - protein, 536 aa, Streptococcus pyogenes
QELDINRLSGYDVDHIVPQSFLKDDSIDNKVLTRSDKNRGKSDNVPSEEVVKKMKNYWRQLLNAKLITQRKFDNLTKAERGGLSELDKVGFIKRQLVETRQITKHVAQILDSRMNTKYDENDKLIREVRVITLKSKLVSDFRKDFQFYKVREINNYHHAHDAYLNAVVGTALIKKYPKLESEFVYGDYKVYDVSEQEIGKATAKYFFYSNIMNFFKTEITLANGEIRKRPLIETNGETGEIVWDKGRDFATVRKVLSMPQVNIVKKTEVQTGGFSKESILPKRNSDKLIARKKDWDPKKYGGFDSPTVAYSVLVVAKVEKGKSKKLKSVKELLGITIMERSSFEKDPIDFLEAKGYKEVRKDLIIKLPKYSLFELENGRKRMLASGELQKGNELALPSKYVNFLYLASHYEKLKGSPEDNEQKQLFVEQHKHYLDEIIEQISEFSKRVILADANLDKVLSAYNKHRDKPIREQAENIIHLFTLTNLGAPAAFKYFDTTIDRKRYTSTKEVLDATLIHQSITGLYETRIDLSQLGGD

SEQ ID NO: 40 - protein, 305 aa, Streptococcus pyogenes
IETNGETGEIVWDKGRDFATVRKVLSMPQVNIVKKTEVQTGGFSKESILPKRNSDKLIARKKDWDPKKYGGFDSPTVAYSVLVVAKVEKGKSKKLKSVKELLGITIMERSSFEKDPIDFLEAKGYKEVRKDLIIKLPKYSLFELENGRKRMLASGELQKGNELALPSKYVNFLYLASHYEKLKGSPEDNEQKQLFVEQHKHYLDEIIEQISEFSKRVILADANLDKVLSAYNKHRDKPIREQAENIIHLFTLTNLGAPAAFKYFDTTIDRKRYTSTKEVLDATLIHQSITGLYETRIDLSQLGGD

SEQ ID NO: 41 - protein, 1359 aa, Artificial Sequence
  Synthetic polypeptide
MDKKYSIGLDIGTNSVGWAVITDDYKVPSKKFKVLGNTDRHSIKKNLIGALLFDSGEIAEATRLKRTARRRYTRRKNRICYLQEIFSNEMAKVDDSFFHRLEESFLVEEDKKHERHPIFGNIVDEVAYHEKYPTIYHLRKKLVDSTDKADLRLIYLALAHMIKFRGHFLIEGDLNPDNSDVDKLFIQLVQTYNQLFEENINASGVDAKAILSARLSKSRRLENLIAQLPGEKKNGLFGNLIALSLGLTPNFKSNFDLAEDAKLQLSKDTYDDDLDNLLAQIGDQYADLFLAAKNLSDAILLSDILRLNSEITKAPLSASMIKRYDEHHQDLTLLKALVRQQLPEKYKEIFFDQSKNGYAGYIDGGASQEEFYKFIKPILEKMDGTEELLAKLNREDLLRKQRTFDNGSIPHQIHLGELHAILRRQEDFYPFLKDNREKIEKILTFRIPYYVGPLARGNSRFAWMTRKSEETITPWNFEEVVDKGASAQSFIERMTNFDKNLPNEKVLPKHSLLYEYFTVYNELTKVKYVTEGMRKPAFLSGEQKKAIVDLLFKTNRKVTVKQLKEDYFKKIECFDSVEISGVEDRFNASLGTYHDLLKIIKDKDFLDNEENEDILEDIVLTLTLFEDREMIEERLKTYAHLFDDKVMKQLKRRRYTGWGRLSRKLINGIRDKQSGKTILDFLKDGFANRNFMQLIHDDSLTFKEDIQKAQVSGQGDSLHEHIANLAGSPAIKKGILQTVKVVDELVKVMGRHKPENIVIEMARENQTTQKGQKNSRERMKRIEEGIKELGSQILKEHPVENTQLQNEKLYLYYLQNGRDMYVDQELDINRLSDYDVDHIVPQSFIKDDSIDNKVLTRSDKNRGKSDNVPSEEVVKKMKNYWRQLLNAKLITQRKFDNLTKAERGGLSELDKAGFIKRQLVETRQITKHVAQILDSRMNTKYDENDKLIREVKVITLKSKLVSDFRKDFQFYKVREINNYHHAHDAYLNAVVGTALIKKYPKLESEFVYGDYKVYDVSEQEIGKATAKYFFYSNIMNFFKTEITLANGEIRKRPLIETNGETGEIVWDKGRDFATVRKVLSMPQVNIVKKTEVQTGGFSKESILPKRNSDKLIARKKDWDPKKYGGFDSPTVAYSVLVVAKVEKGKSKKLKSVKELLGITIMERSSFEKNPIDFLEAKGYKEVRKDLIIKLPKYSLFELENGRKRMLASGELQKGNELALPSKYVNFLYLASHYEKLKGSPEDNEQKQLFVEQHKHYLDEIIEQISEFSKRVILADANLDKVLSAYNKHRDKPIREQAENIIHLFTLTNLGAPTAFKYFDTTIDRKRYTSTKEVLDATFIHQSITGLYETRIDLSQLGGD

SEQ ID NO: 42 - protein, 1341 aa, Artificial Sequence
  Synthetic polypeptide
MDQKYSIGLDIGTNSVGWAVVTDDYKVPAKKMKVLGNTDKQSIKKNLLGALLFDSGETAEATRLKRTARRRYTRRRNRLRYLQEIFAEEMNKVDENFFQRLDDSFLVDEDKRGERHPIFGNIAAEVKYHDDFPTIYHLRKHLADISQKADLRLVYLALAHMIKFRGHFLIEGQLKAENTNVQALFKDFVEVYDKTVEESHLSEMTVDALSILTEKVSKSRRLENLIAHYPAEKKNTLFGNLIALSLGLQPNFKTNFQLSEDAKLQFSKDTYEEDLEGLLGEIGDEYADLFASAKNLYDAILLSGILTVDDNSTKAPLSASMVKRYEEHQKDLKKLKDFIKVNAPDQYNAIFKDKNKKGYAGYIENGVKQDEFYKYLKGILLQINGSGDFLDKIDREDFLRKQRTFDNGSIPHQIHLQEMHAILRRQEEHYPFLKENQDKIEKILTFRIPYYVGPLARKGSRFAWAEYKADEKITPWNFDDILDKEKSAEKFITRMTLNDLYLPEEKVLPKHSLLYETFTVYNELTKVKYVNEQGEAKFFDANMKQEIFDHVFKENRKVTKDKLLNYLNKEFEEFRIVNLTGLDKENKAFNSSLGTYHDLRKILDKSFLDDKANEKTIEDIIQTLTLFEDREMIRQRLQKYSDIFTKAQLKKLERRHYTGWGRLSYKLINGIRNKENKKTILDYLIDDGYANRNFMQLINDDALSFKEEIARAQIIGDVDDIANVVHDLPGSPAIKKGILQSVKIVDELVKVMGHNPANIIIEMARENQMTDKGRRNSQQRLKLLQDSLKPVNIKNVENQQLQNDRLFLYYIQNGKDMYTGETLDINNLSQYDIDHIIPQAFIKDNSLDNRVLTRSDKNRGKSDDVPSIEVVHEMKSFWSKLLSVKLITQRKFDNLTKAERGGLTEEDKAGFIKRQLVETRQITKHVAQILDERFNTEFDGNKRRIRNVKIITLKSNLVSNFRKEFELYKVREINDYHHAHDAYLNAVVGNALLLKYPQLEPEFVYGEYPKYNSYRSRKSATEKFLFYSNILRFFKKEDIQTNEDGEIAWNKEKHIKILRKVLSYPQVNIVKKTEEQTGGFSKESILPKGESDKLIPRKTKNSYWNPKKYGGFDSPVVAYSILVFADVEKGKSKKLRKVQDMVGITIMEKKRFEKHPVDFLEQRGYRNVRLEKIIKLPKYSLFELENKRRRLLASARELQKGNELVIPQRFTTLLYHSYQIEKNYEPEHREYVEKHKDEFKELLEYISVFSRKYVLADNNLTKIEMLFSKNKDAEVSSLAKSFISLLTFTAFGAPAAFNFFGENIDRKRYTSVTECLNATLIHQSITGLYETRIDLSKLGED

SEQ ID NO: 43 - protein, 1356 aa, Artificial Sequence
  Synthetic polypeptide
MTKKNYSIGLDIGTNSVGWAVITDDYKVPAKKMKVLGNTDKKYIKKNLLGALLFDSGETAEATRLKRTARRRYTRRKNRLRYLQEIFAEEMTKVDESFFQRLDESFLRWDDDNKKLGRYPIFGNKADVVKYHQEFPTIYHLRKHLADSSEKADLRLVYLALAHMIKFRGHFLIEGELNAENTDVQKIFADFVGVYDRTFDDSHLSEITVDAASILTEKISKSRRLENLIKYYPTEKKNTLFGNLIALALGLQPNFKMNFKLSEDAKLQFSKDSYEEDLGELLGKIGDDYADLFTSAKNLYDAILLSGILIVDDNSTKAPLSASMIKRYVEHQEDLEKLKEFIKANKSELYHDIFKDKNKNGYAGYIENGVKQDEFYKYLKNTLSKIAGSDYFLDKIEREDFLRKQRTFDNGSIPHQIHLQEMHAILRRQGDYYPFLKENQDRIEKILTFRIPYYVGPLARKDSRFSWAEYHSDEKITPWNFDKVIDKEKSAEKFITRMTLNDLYLPEEKVLPKHSHVYETYAVYNELTKIKYVNEQGKDSFFDSNMKQEIFDHVFKENRKVTKEKLLNYLNKEFPEYRIKDLIGLDKENKSFNASLGTYHDLKKILDKAFLDDKVNEEVIEDIIKTLTLFEDKDMIHERLQKYSDIFTADQLKKLERRHYTGWGRLSYKLINGIRNKENNKTILDYLIDDGSANRNFMQLINDDTLPFKQIIQKSQVVGDVDDIEAVVHDLPGSPAIKKGILQSVKIVDELVKVMGDNPDNIVIEMARENQTTNRGRSQSQQRLKKLQNSLKPSYIEDKVENSHLQNDQLFLYYIQNGKDMYTGDELDIDHLSDYDIDHIIPQAFIKDDSIDNRVLTSSAKNRGKSDDVPSLDIVRARKAEWVRLYKSGLISKRKFDNLTKAERGGLTEADKAGFIKRQLVETRQITKHVAQILDARFNTESDENDKVIRDVKVITLKSNLVSQFRKDFEFYKVREINDYHHAHDAYLNAVVGTALLKKYPKLASEFVYGEYKKYDISSDKATAKYFFYSNLMNFFKRVIRYSNGKVIVRPVVEYSKDTEDIAWDKKSNFRTICKVLSYPQVNIVKKVETQTGGFSKESILPKGDSDKLIPRKTKKAYWDTKKYGGFDSPTVAYSVFVVADVEKGKAKKLKTVKELVGISIMERSFFEENPVEFLENKGYHNIREDKLIKLPKYSLFEFEGGKRRLLASASELQKGNEMVIPGHLVKLLYHAQRINSFNSTKYLDYVSAHKKEFEKVLSCVEDFANLYVDVEKNLSKIRAVADSMDNFSIEEISNSFINLLTLTALGAPADFNFLGEKIPRKRYTSTKECLNATLIHQSITGLYETRIDLSKIGEE

SEQ ID NO: 44 - protein, 1365 aa, Streptococcus agalactiae
MNKPYSIGLDIGTNSVGWSIITDDYKVPAKKIRVLGNTDKEYIKKNLIGALLFDGGNTAADRRLKRTARRRYTRRRNRILYLQEIFAEEMSKVDDSFFHRLEDSFLVEEDKRGSKYPIFATLQEEKYYHEKFPTIYHLRKELADKKEKADLRLVYLALAHIIKFRGHFLIEDDRFDVRNTDIQKQYQAFLEIFDTTFENNDLLSQDVDVEAILTDKISKSAKKDRILAQYPNQKSTGIFAEFLKLIVGNQADFKKHFNLEDKTPLQFAKDSYDEDLENLLGQIGDEFADLFSAAKKLYDSVLLSGILTVTDLSTKAPLSASMIQRYDEHREDLKQLKQFVKASLPEKYQEIVADSSKDGYAGYIEGKTNQEAFYKYLSKLLTKQEGSEYFLEKIKNEDFLRKQRTFDNGSIPHQVHLTELRAIIRRQSEYYPFLKENLDRIEKILTFRIPYYVGPLAREKSDFAWMTRKTDDSIRPWNFEDLVDKEKSAEAFIHRMTNNDLYLPEEKVLPKHSLIYEKFTVYNELTKVRFLAEGFKDFQFLNRKQKETIFNSLFKEKRKVTEKDIISFLNKVDGYEGIAIKGIEKQFNASLSTYHDLKKILGKDFLDNTDNELILEDIVQTLTLFEDREMIKKRLDIYKDFFTESQLKKLYRRHYTGWGRLSAKLINGIRNKENQKTILDYLIDDGSANRNFMQLIKDAGLSFKPIIDKARTGSHSDNLKEVIGELAGSPAIKKGILQSLKIVDELVKVMGYEPEQIVVEMARENQTTAKGLSRSRQRLTTLRESLANLKSEKKPKYVKDQVENHHLSDDRLFLYYLQNGKDMYTDDELDIDNLSQYDIDHIIPQAFIKDDSIDNRVLVSSAKNRGKSDDVPSLEIVKDCKVFWKKLLDAKLMSQRKYDNLTKAERGGLTSDDKARFIQRQLVETRQITKHVARILDERFNNELDSKGRRIRKVKIVTLKSNLVSNFRKEFVFYKIREVNNYHHAHDAYLNAVVAKAILTKYPQLEPEFVYGDYPKYNSYKTRKATEKLFFYSNIMNFFKTKVTLADGTVVVKDDIEVNNDTGEIVWDKKKHFATVRKVLSYPQVNIVKKTEIQTGGFSKESILAHGNSDKLIPRKTKDIYLDPKKYGGFDSPIVAYSVLVVADIKKGKAQKLKTVTELLGITIMERSRFEKNPSAFLESKGYLNIRTDKLIILPKYSLFELENGRRRLLASAGELQKGNELALPTQFMKFLYLASRYNESKGKPEEIEKKQEFVNQHVSYFDDIFQIINDFSKRVILADANLEKINRLYQDNKENIPVDELANNIINLFTFTSLGAPAAFKFFDKIVDRKRYTSTKEVLNSTLIHQSITGLYETRIDLGKLGED

SEQ ID NO: 45 - protein, 1365 aa, Streptococcus agalactiae
MNKPYSIGLDIGTNSVGWSIITDDYKVPAKKMRVLGNTDKEYIKKNLIGALLFDGGNTAADRRLKRTARRRYTRRRNRILYLQEIFAEEMSKVDDSFFHRLEDSFLVEEDKRGSKYPIFATLQEEKDYHEKFPTIYHLRKELADKQEKADLRLIYLALAHIIKFRGHFLIEDDRFDVRNTDIQKQYQAFLEIFDTTFENNHLLSQNVDVEAILTDKISKSAKKDRILAQYPNQKSTGIFAEFLKLIVGNQADFKKHFNLEDKTPLQFAKDSYDEDLENLLGQIGDEFADLFSAAKKLYDSVLLSGILTVIDLSTKAPLSASMIQRYDEHREDLKQLKQFVKASLPEKYQEIFADSSKDGYAGYIEGKTNQEAFYKYLSKLLTKQEDSENFLEKIKNEDFLRKQRTFDNGSIPHQVHLTELKAIIRRQSEYYPFLKENQDRIEKILTFRIPYYIGPLAREKSDFAWMTRKTDDSIRPWNFEDLVDKEKSAEAFIHRMTNNDFYLPEEKVLPKHSLIYEKFTVYNELTKVRYKNEQGETYFFDSNIKQEIFDGVFKEHRKVSKKKLLDFLAKEYEEFRIVDVIGLDKENKAFNASLGTYHDLEKILDKDFLDNPDNESILEDIVQTLTLFEDREMIKKRLENYKDLFTESQLKKLYRRHYTGWGRLSAKLINGIRDKESQKTILDYLIDDGRSNRNFMQLINDDGLSFKSIISKAQAGSHSDNLKEVVGELAGSPAIKKGILQSLKIVDELVKVMGYEPEQIVVEMARENQTTNQGRRNSRQRYKLLDDGVKNLASNILKEYPTDNQALQNERLFLYYLQNGRDMYTGEALDIDNLSQYDIDHIIPQAFIKDDSIDNRVLVSSAKNRGKSDDVPSLEIVKDCKVFWKKLLDAKLMSQRKYDNLTKAERGGLTSDDKARFIQRQLVETRQITKHVARILDERFNNELDSKGRRIRKVKIVTLKSNLVSNFRKEFGFYKIREVNDYHHAHDAYLNAVVAKAILTKYPQLEPEFVYGLYRRKKLSKIVRATRKMFFYSNLMNMFKRVVRLADGSIVVRPVIETGRYMGKTAWDKKKHFATVRKVLSYPQVNIVKKTEIQTGGFSKESILAHGNSDKLIPRKTKDIYLDPKKYGGFDSPIVAYSVLVVADIKKGKAQKLKTVTELLGITIMERSKFEKNPSAFLESKGYLNIRDDKLMILPKYSLFELENGRRRLLASAGELQKGNELALPTQFMKFLYLASRYNESKGKPEEIEKKQEFVNQHVSYFDDILQLINDFSKRVILADANLEKINKLYQDNKENISVDELANNIINLFTFTSLGAPAAFKFFDKIVDRKRYTSTKEVLNSTLIHQSITGLYETRIDLSKLGED

SEQ ID NO: 46 - protein, 1365 aa, Streptococcus agalactiae
MNKPYSIGLDIGTNSVGWSIITDDYKVPAKKMRVLGNTDKEYIKKNLIGALLFDGGNTAADRRLKRTARRRYTRRRNRILYLQEIFAEEMSKVDDSFFHRLEDSFLVEEDKRGSKYPIFATLQEEKDYHEKFSTIYHLRKELADKKEKADLRLIYIALAHIIKFRGHFLIEDDSFDVRNTDISKQYQDFLEIFNITFENNDLLSQNVDVEAILTDKISKSAKKDRILAQYPNQKSTGIFAEFLKLIVGNQADFKKYFNLEDKTPLQFAKDSYDEDLENLLGQIGDEFADLFSAAKKLYDSVLLSGILTVIDLSTKAPLSASMIQRYDEHREDLKQLKQFVKASLPEKYQEIFADSSKDGYAGYIEGKTNQEAFYKYLSKLLTKQEDSENFLEKIKNEDFLRKQRTFDNGSIPHQVHLTELKAIIRRQSEYYPFLKENQDRIEKILTFRIPYYIGPLAREKSDFAWMTRKTDDSIRPWNFEDLVDKEKSAEAFIHRMTNNDFYLPEEKVLPKHSLIYEKFTVYNELTKVRYKNEQGETYFFDSNIKQEIFDGVFKEHRKVSKKKLLDFLAKEYEEFRIVDVIGLDKENKAFNASLGTYHDLEKILDKDFLDNPDNESILEDIVQTLTLFEDREMIKKRLENYKDLFTESQLKKLYRRHYTGWGRLSAKLINGIRDKESQKTILDYLIDDGRSNRNFMQLINDDGLSFKSIISKAQAGSHSDNLKEVVGELAGSPAIKKGILQSLKIVDELVKVMGYEPEQIVVEMARENQTTNQGRRNSRQRYKLLDDGVKNLASNILKEYPTDNQALQNERLFLYYLQNGRDMYTGEALDIDNLSQYDIDHIIPQAFIKDDSIDNRVLVSSAKNRGKSDDVPSLEIVKDCKVFWKKLLDAKLMSQRKYDNLTKAERGGLTSDDKARFIQRQLVETRQITKHVARILDERFNNELDSKGRRIRKVKIVTLKSNLVSNFRKEFGFYKIREVNNYHHAHDAYLNAVVAKAILTKYPQLEPEFVYGDYPKYNSYKTRKATEKLFFYSNIMNFFKTKVTLADGTVVVKDDIEVNNDTGEIVWDKKKHFATVRKVLSYPQNNIVKKTEIQTGGFSKESILAHGNSDKLIPRKTKDIYLDPKKYGGFDSPIVAYSVLVVADIKKGKAQKLKTVTELLGITIMERSRFEKNPSAFLESKGYLNIRADKLIILPKYSLFELENGRRRLLASAGELQKGNELALPTQFMKFLYLASRYNESKGKPEEIEKKQEFVNQHVSYFDDILQLINDFSKRVILADANLEKINKLYQDNKENISVDELANNIINLFTFTSLGAPAAFKFFDKIVDRKRYTSTKEVLNSTLIHQSITGLYETRIDLGKLGED

SEQ ID NO: 47 - protein, 1369 aa, Streptococcus agalactiae
MNKPYSIGLDIGTNSVGWSIITDDYKVPAKKMRVLGNTDKEYIKKNLIGALLFDGGNTAADRRLKRTARRRYTRRRNRILYLQEIFAEEMSKVDDSFFHRLEDSFLVEEDKRGSKYPIFATLQEEKDYHEKFSTIYHLRKELADKKEKADLRLIYIALAHIIKFRGHFLIEDDSFDVRNTDISKQYQDFLEIFNTIFENNDLLSQNVDVEAILTDKISKSAKKDRILAQYPNQKSTGIFAEFLKLIVGNQADFKKYFNLEDKTPLQFAKDSYDEDLENLLGQIGDEFADLFSAAKKLYDSVLLSGILTVIDLSTKAPLSASMIQRYDEHREDLKQLKQFVKASLPEKYQEIFADSSKDGYAGYIEGKTNQEAFYKYLSKLLTKQEDSENFLEKIKNEDFLRKQRTFDNGSIPHQVHLTELKAIIRRQSEYYPFLKENQDRIEKILTFRIPYYIGPLAREKSDFAWMTRKTDDSIRPWNFEDLVDKEKSAEAFIHRMTNNDFYLPEEKVLPKHSLIYEKFTVYNELTKVRYKNEQGETYFFDSNIKQEIFDGVFKEHRKVSKKKLLDFLAKEYEEFRIVDVIGLDKENKAFNASLGTYHDLEKILDKDFLDNPDNESILEDIVQTLTLFEDREMIKKRLENYKDLFTESQLKKLYRRHYTGWGRLSAKLINGIRDKESQKTILDYLIDDGRSNRNFMQLINDDGLSFKSIISKAQAGSHSDNLKEVVGELAGSPAIKKGILQSLKIVDELVKVMGYEPEQIVVEMARENQTTNQGRRNSRQRYKLLDDGVKNLASNILKEYPTDNQALQNERLFLYYLQNGRDMYTGEALDIDNLSQYDIDHIIPQAFIKDDSIDNRVLVSSAKNRGKSDDVPSLEIVKDCKVFWKKLLDAKLMSQRKYDNLTKAERGGLTSDDKARFIQRQLVETRQITKHVARILDERFNNELDSKGRRIRKVKIVTLKSNLVSNFRKEFGFYKIREVNNYHHAHDAYLNAVVAKAILTKYPQLEPEFVYGDYPKYNSYKTRKATEKLFFYSNIMNFFKTKVTLADGTVVVKDDIEVNNDTGEIVWDKKKHFATVRKVLSYPQNNIVKKTEIQTGGFSKESILAHGNSDKLIPRKTKDIYLDPKKYGGFDSPIVAYSVLVVADIKKGKAQKLKTVTELLGITIMERSRFEKNPSAFLESKGYLNIRADKLIILPKYSLFELENGRRRLLASAGETIDRLQKGNELALPTQFMKFLYLASRYNESKGKPEEIEKKQEFVNQHVSYFDDILQLINDFSKRVILADANLEKINKLYQDNKENISVDELANNIINLFTFTSLGAPAAFKFFDKIVDRKRYTSTKEVLNSTLIHQSITGLYETRIDLGKLGED

SEQ ID NO: 48 - protein, 1363 aa, Streptococcus agalactiae
MNKPYSIGLDIGTNSVGWSIITDDYKVPAKKMRVLGNTDKEYIKKNLIGALLFDGGNTAADRRLKRTARRRYTRRRNRILYLQEIFAEEMSKVDDSFFHRLEDSFLVEEDKRGSKYPIFATLQEEKDYHEKFSTIYHLRKELADKKEKADLRLIYIALAHIIKFRGHFLIEDDSFDVRNTDISKQYQDFLEIFNTTFENNDLLSQNVDVEAILTDKISKSAKKDRILAQYPNQKSTGIFAEFLKLIVGNQADFKKYFNLEDKTPLQFAKDSYDEDLENLLGQIGDEFADLFSAAKKLYDSVLLSGILTVIDLSTKAPLSASMIQRYDEHREDLKQLKQFVKASLPEKYQEIFADSSKDGYAGYIEGKTNQEAFYKYLSKLLTKQEDSENFLEKIKNEDFLRKQRTFDNGSIPHQVHLTELKAIIRRQSEYYPFLKENQDRIEKILTFRIPYYIGPLAREKSDFAWMTRKTDDSIRPWNFEDLVDKEKSAEAFIHRMTNNDFYLPEEKVLPKHSLIYEKFTVYNELTKVRYKNEQGETYFFDSNIKQEIFDGVFKEHRKVSKKKLLDFLAKEYEEFRIVDVIGLDKENKAFNASLGTYHDLEKILDKDFLDNPDNESILEDIIQTLTLFEDREMIKKRLENYKDLFTESQLKKLYRRHYTGWGRLSAKLINGIRDKESQKTILDYLIDDGRSNRNFMQLINDDGLSFKSIISKAQAGSHSDNLKEVVGELAGSPAIKKGILQSLKIVDELVKVMGYEPEQIVVEMARENQTTNQGRRNSRQRYKLLDDGVKNLASNILKEYPTDNQALQNERLFLYYLQNGRDMYTGEALDIDNLSQYDIDHIIPQAFIKDDSIDNRVLVSSAKNRGKSDDVPSLEIVKDCKVFWKKLLDAKLMSQRKYDNLTKAERGGLTSKARFIQRQLVETRQITKHVARILDERFNNELDSKGRRIRKVKIVTLKSNLVSNFRKEFGFYKIREVNNYHHAHDAYLNAVVAKAILTKYPQLEPEFVYGDYPKYNSYKTRKATEKLFFYSNIMNFFKTKVTLADGTVVVKDDIEVNNDTGEIVWDKKKHFATVRKVLSYPQNNIVKKTEIQTGGFSKESILAHGNSDKLIPRKTKDIYLDPKKYGGFDSPIVAYSVLVVADIKKGKAQKLKTVTELLGITIMERSRFEKNPSAFLESKGYLNIRADKLIILPKYSLFELENGRRRLLASAGELQKGNELALPTQFMKFLYLASRYNESKGKPEEIEKKQEFVNQHVSYFDDILQLINDFSKRVILADANLEKINKLYQDNKENISVDELANNIINLFTFTSLGAPAAFKFFDKIVDRKRYTSTKEVLNSTLIHQSITGLYETRIDLGKLGED

SEQ ID NO: 49 - protein, 1365 aa, Streptococcus agalactiae
MNKPYSIGLDIGTNSVGWSIITDDYKVPAKKMRVLGNTDKEYIKKNLIGALLFDGGNTAADRRLKRTARRRYTRRRNRILYLQEIFAEEMSKVDDSFFHRLEDSFLVEEDKRGSKYPIFATLQEEKDYHEKFSTIYHLRKELADKKEKADLRLIYIALAHIIKFRGHFLIEDDSFDVRNTDISKQYQDFLEIFNTTFENNDLLSQNVDVEAILTDKISKSAKKDRILAQYPNQKSTGIFAEFLKLIVGNQADFKKYFNLEDKTPLQFAKDSYDEDLENLLGQIGDEFADLFSAAKKLYDSVLLSGILTVIDLSTKAPLSASMIQRYDEHREDLKQLKQFVKASLPEKYQEIFADSSKDGYAGYIEGKTNQEAFYKYLSKLLTKQEDSENFLEKIKNEDFLRKQRTFDNGSIPHQVHLTELKAIIRRQSEYYPFLKENQDRIEKILTFRIPYYIGPLAREKSDFAWMTRKTDDSIRPWNFEDLVDKEKSAEAFIHRMTNNDFYLPEEKVLPKHSLIYEKFTVYNELTKVRYKNEQGETYFFDSNIKQEIFDGVFKEHRKVSKKKLLDFLAKEYEEFRIVDVIGLDKENKAFNASLGTYHDLEKILDKDFLDNPDNESILEDIVQTLTLFEDREMIKKRLENYKDLFTESQLKKLYRRHYTGWGRLSAKLINGIRDKESQKTILDYLIDDGRSNRNFMQLINDDGLSFKSIISKAQAGSHSDNLKEVVGELAGSPAIKKGILQSLKIVDELVKVMGYEPEQIVVEMARENQTTNQGRRNSRQRYKLLDDGVKNLASNILKEYPTDNQALQNERLFLYYLQNGRDMYTGEALDIDDLSQYDIDHIIPQAFIKDDSIDNRVLVSSAKNRGKSDDVPSLEIVKDCKVFWKKLLDAKLMSQRKYDNLTKAERGGLTSDDKARFIQRQLVETRQITKHVARILDERFNNELDSKGRRIRKVKIVTLKSNLVSNFRKEFGFYKIREVNNYHHAHDAYLNAVVAKAILTKYPQLEPEFVYGDYPKYNSYKTRKATEKLFFYSNIMNFFKTKVTLADGTVVVKDDIEVNNDTGEIVWDKKKHFATVRKVLSYPQNNIVKKTEIQTGGFSKESILAHGNSDKLIPRKTKDIYLDPKKYGGFDSPIVAYSVLVVADIKKGKAQKLKTVTELLGITIMERSRFEKNPSAFLESKGYLNIRADKLIILPKYSLFELENGRRRLLASAGELQKGNELALPTQFMKFLYLASRYNESKGKPEEIEKKQEFVNQHVSYFDDILQLINDFSKRVILADANLEKINKLYQDNKENISVDELANNIINLFTFTSLGAPAAFKFFDKIVDRKRYTSTKEVLNSTLIHQSITGLYETRIDLGKLGED

SEQ ID NO: 50 - protein, 1365 aa, Streptococcus agalactiae
MNKPYSIGLDIGTNSVGWSIITDDYKVPAKKMRVLGNTDKEYIKKNLIGALLFDGGNTAADRRLKRTARRRYTRRRNRILYLQEIFAEEMSKVDDSFFHRLEDSFLVEEDKRGSKYPIFATLQEEKDYHEKFSTIYHLRKELADKKEKADLRLIYIALAHIIKFRGHFLIEDDSFDVRNTDISKQYQDFLEIFNTTFENNDLLSQNVDVEAILTDKISKSAKKDRILAQYPNQKSTGIFAEFLKLIVGNQADFKKYFNLEDKTPLQFAKDSYDEDLENLLGQIGDEFADLFSAAKKLYDSVLLSGILTVIDLSTKAPLSASMIQRYDEHREDLKQLKQFVKASLPEKYQEIFADSSKDGYAGYIEGKTNQEAFYKYLSKLLTKQEDSENFLEKIKNEDFLRKQRTFDNGSIPHQVHLTELKAIIRRQSEYYPFLKENQDRIEKILTFRIPYYIGPLAREKSDFAWMTRKTDDSIRPWNFEDLVDKEKSAEAFIHRMTNNDFYLPEEKVLPKHSLIYEKFTVYNELTKVRYKNEQGETYFFDSNIKQEIFDGVFKEHRKVSKKKLLDFLAKEYEEFRIVDVIGLDKENKAFNASLGTYHDLEKILDKDFLDNPDNESILEDIVQTLTLFEDREMIKKRLENYKDLFTESQLKKLYRRHYTGWGRLSAKLINGIRDKESQKTILDYLIDDGRSNRNFMQLINDDGLSFKSIISKAQAGSHSDNLKEVVGELAGSPAIKKGILQSLKIVDELVKVMGYEPEQIVVEMARENQTTNQGRRNSRQRYKLLDDGVKNLASNILKEYPTDNQALQNERLFLYYLQNGRDMYTGEALDIDNLSQYDIDHIIPQAFIKDDSIDNRVLVSSAKNRGKSDDVPSLEIVKDCKVFWKKLLDAKLMSQRKYDNLTKAERGGLTSDDKARFIQRQLVETRQITKHVARILDERFNNELDSKGRRIRKVKIVTLKSNLVSNFRKEFGFYKIREVNNYHHAHDAYLNAVVAKAILTKYPQLEPEFVYGDYPKYNSYKTRKATEKLFFYSNIMNFFKTKVTLADGTVVVKDDIEVNNDTGEIVWDKKKHFATVRKVLSYPQNNIVKKTEIQTGGFSKESILAHGNSDKLIPRKTKDIYLDPKKYGGFDSPIVAYSVLVVADIKKGKAQKLKTVTELLGITIMERSRFEKNPSAFLESKGYLNIRADKLIILPKYSLFELENGRRRLLASAGELQKGNELALPTQFMKFLYLASRYNESKGKPEEIEKKQEFVNQHVSYFDDILQLINDFSKRVILADANLEKINKLYQDNKENISVDELANNIINLFTFTSLGAPAAFKFFDKIVDRKRYTSTKEVLNSTLIHQSITGLYETRIDLGKLGED

SEQ ID NO: 51 - protein, 1365 aa, Streptococcus agalactiae
MNKPYSIGLDIGTNSVGWSIITDDYKVPAKKMRVLGNTDKEYIKKNLIGALLFDGGNTAADRRLKRTARRRYTRRRNRILYLQEIFAEEMSKVDDSFFHRLEDSFLVEEDKRGSKYPIFATLQEEKDYHEKFSTIYHLRKELADKKEKADLRLIYIALAHIIKFRGHFLIEDDSFDVRNTDISKQYQDFLEIFNTTFENNDLLSQNVDVEAILTDKISKSAKKDRILAQYPNQKSTGIFAEFLKLIVGNQADFKKYFNLEDKTPLQFAKDSYDEDLENLLGQIGDEFADLFSAAKKLYDSVLLSGILTVIDLSTKAPLSASMIQRYDEHREDLKQLKQFVKASLPEKYQEIFADSSKDGYAGYIEGKTNQEAFYKYLSKLLTKQEDSENFLEKIKNEDFLRKQRTFDNGSIPHQVHLTELKAIIRRQSEYYPFLKENQDRIEKILTFRIPYYIGPLAREKSDFAWMTRKTDDSIRPWNFEDLVDKEKSAEAFIHRMTNNDFYLPEEKVLPKHSLIYEKFTVYNELTKVRYKNEQGETYFFDSNIKQEIFDGVFKEHRKVSKKKLLDFLAKEYEEFRIVDVIGLDKENKAFNASLGTYHDLEKILDKDFLDNPDNESILEDIVQTLTLFEDREMIKKRLENYKDLFTESQLKKLYRRHYTGWGRLSAKLINGIRDKESQKTILDYLIDDGRSNRNFMQLINDDGLSFKSIISKAQAGSHSDNLKEVVGELAGSPAIKKGILQSLKIVDELVKVMGYEPEQIVVEMARENQTTNQGRRNSRQRYKLLDDGVKNLASNILKEYPTDNQALQNERLFLYYLQNGRDMYTGEALDIDNLSQYDIDHIIPQAFIKDDSIDNRVLVSSAKNRGKSDDVPSLEIVKDCKVFWKKLLDAKLMSQRKYDNLTKAERGGLTSDDKARFIQRQLVETRQITKHVARILDERFNNELDSKGRRIRKVKIVTLKSNLVSNFRKEFGFYKIREVNNYHHAHDAYLNAVVAKAILTKYPQLEPEFVYGDYPKYNSYKTRKATEKLFFYSNIMNFFKTKVTLADGTVVVKDDIEVNNDTGEIVWDKKKHFATVRKVLSYPQNNIVKKTEIQTGGFSKESILAHGNSDKLIPRKTKDIYLDPKKYGGFDSPIVAYSVLVVADIKKGKAQKLKTVTELLGITIMERSRFEKNPSAFLESKGYLNIRADKLIILPKYSLFELENGRRRLLASAGELQKGNELALPTQFMKFLYLASRYNESKGKPEEIEKKQEFVNQHVSYFDDILQLINDFSKRVILADANLEKINKLYQDNKENISVDELANNIINLFTFTSLGAPAAFKFFDKIVDRKRYTSTKEVLNSTLIHQSITGLYETRIDLGKLGGD

SEQ ID NO: 52 - protein, 1365 aa, Streptococcus agalactiae
MNKPYSIGLDIGTNSVGWSIITDDYKVPAKKMRVLGNTDKEYIKKNLIGALLFDGGNTAADRRLKRTARRRYTRRRNRILYLQEIFAEEMSKVDDSFFHRLEDSFLVEEDKRGSKYPIFATLQEEKDYHEKFSTIYHLRKELADKKEKADLRLIYIALAHIIKFRGHFLIEDDSFDVRNTDISKQYQDFLEIFNTTFENNDLLSQNVDVEAILTDKISKSAKKDRILAQYPNQKSTGIFAEFLKLIVGNQADFKKYFNLEDKTPLQFAKDSYDEDLENLLGQIGDEFADLFSAAKKLYDSVLLSGILTVIDLSTKAPLSASMIQRYDEHREDLKQLKQFVKASLPEKYQEIFADSSKDGYAGYIEGKTNQEAFYKYLSKLLTKQEDSENFLEKIKNEDFLRKQRTFDNGSIPHQVHLTELKAIIRRQSEYYPFLKENQDRIEKILTFRIPYYIGPLAREKSDFAWMTRKTDDSIRPWNFEDLVDKEKSAEAFIHRMTNNDFYLPEEKVLPKHSLIYEKFTVYNELTKVRYKNEQGETYFFDSNIKQEIFDGVFKEHRKVSKKKLLDFLAKEYEEFRIVDVIGLDKENKAFNASLGTYHDLEKILDKDFLDNPDNESILEDIVQTLTLFEDREMIKKRLENYKDLFTESQLKKLYRRHYTGWGRLSAKLINGIRDKESQKTILDYLIDDGRSNRNFMQLINDDGLSFKSIISKAQAGSHSDNLKEVVGELAGSPAIKKGILQSLKIVDELVKVMGYEPEQIVVEMARENQTTNQGRRNSRQRYKLLDDGVKNLASNILKEYPTDNQALQNERLFLYYLQNGRDMYTGEALDIDNLSQYDIDHIIPQAFIKDDSIDNRVLVSSAKNRGKSDDVPSLEIVKDCKVFWKKLLDAKLMSQRKYDNLTKAERGGLTSDDKARFIQRQLVETRQITKHVARILDERFNNELDSKGRRIRKVKIVTLKSNLVSNFRKEFGFYKIREVNNYHHAHDAYLNAVVAKAILTKYPQLEPEFVYGDYPKYNSYKTRKATEKLFFYSNIMNFFKTKVTLADGTVVVKDDIEVNNDTGEIVWDKKKHFATVRKVLSYPQNNIVKKTEIQTGGFSKESILAHGNSDKLIPRKTKDIYLDPKKYGGFDSPIVAYSVLVVADIKKGKAQKLKTVTELLGITIMERSRFEKNPSAFLESKGYLNIRDDKLMILPKYSLFELENGRRRLLASAGELQKGNELALPTQFMKFLYLASRYNESKGKPEEIEKKQEFVNQHVSYFDDILQLINDFSKRVILADANLEKINKLYQDNKENISVDELANNIINLFTFTSLGAPAAFKFFDKIVDRKRYTSTKEVLNSTLIHQSITGLYETRIDLGKLGED

SEQ ID NO: 53 - protein, 1365 aa, Streptococcus agalactiae
MNKPYSIGLDIGTNSVGWSIITDDYKVPAKKMRVLGNTDKEYIKKNLIGALLFDGGNTAADRRLKRTARRRYTRRRNRILYLQEIFAEEMSKVDDSFFHRLEDSFLVEEDKRGSKYPIFATLQEEKDYHEKFSTIYHLRKELADKKEKADLRLIYIALAHIIKFRGHFLIEDDSFDVRNTDISKQYQDFLEIFNTTFENNDLLSQNVDVEAILTDKISKSAKKDRILAQYPNQKSTGIFAEFLKLIVGNQADFKKYFNLEDKTPLQFAKDSYDEDLENLLGQIGDEFADLFSAAKKLYDSVLLSGILTVIDLSTKAPLSASMIQRYDEHREDLKQLKQFVKASLPEKYQEIFADSSKDGYAGYIEGKTNQEAFYKYLSKLLTKQEDSENFLEKIKNEDFLRKQRTFDNGSIPHQVHLTELKAIIRRQSEYYPFLKENQDRIEKILTFRIPYYIGPLAREKSDFAWMTRKTDDSIRPWNFEDLVDKEKSAEAFIHRMTNNDFYLPEEKVLPKHSLIYEKFTVYNELTKVRYKNEQGETYFFDSNIKQEIFDGVFKEHRKVSKKKLLDFLAKEYEEFRIVDVIGLDKENKAFNASLGTYHDLEKILDKDFLDNPDNESILEDIVQTLTLFEDREMIKKRLENYKDLFTESQLKKLYRRHYTGWGRLSAKLINGIRDKESQKTILDYLIDDGRSNRNFMQLINDDGLSFKSIISKAQAGSHSDNLKEVVGELAGSPAIKKGILQSLKIVDELVKVVGYEPEQIVVEMARENQTTNQGRRNSRQRYKLLDDGVKNLASNILKEYPTDNQALQNERLFLYYLQNGRDMYTGEALDIDNLSQYDIDHIIPQAFIKDDSIDNRVLVSSAKNRGKSDDVPSLEIVKDCKVFWKKLLDAKLMSQRKYDNLTKAERGGLTSDDKARFIQRQLVETRQITKHVARILDERFNNELDSKGRRIRKVKIVTLKSNLVSNFRKEFGFYKIREVNNYHHAHDAYLNAVVAKAILTKYPQLEPEFVYGDYPKYNSYKTRKATEKLFFYSNIMNFFKTKVTLADGTVVVKDDIEVNNDTGEIVWDKKKHFATVRKVLSYPQNNIVKKTEIQTGGFSKESILAHGNSDKLIPRKTKDIYLDPKKYGGFDSPIVAYSVLVVADIKKGKAQKLKTVTELLGITIMERSRFEKNPSAFLESKGYLNIRADKLIILPKYSLFELENGRRRLLASAGELQKGNELALPTQFMKFLYLASRYNESKGKPEEIEKKQEFVNQHVSYFDDILQLINDFSKRVILADANLEKINKLYQDNKENISVDELANNIINLFTFTSLGAPAAFKFFDKIVDRKRYTSTKEVLNSTLIHQSITGLYETRIDLGKLGED

SEQ ID NO: 54 - protein, 1365 aa, Streptococcus agalactiae
MNKPYSIGLDIGTNSVGWSIITDDYKVPAKKMRVLGNTDKEYIKKNLIGALLFDGGNTAADRRLKRTARRRYTRRRNRILYLQEIFAEEMSKVDDSFFHRLEDSFLVEEDKRGSKYPIFATLQEEKDYHEKFSTIYHLRKELADKKEKADLRLIYIALAHIIKFRGHFLIEDDSFDVRNTDISKQYQDFLEIFNTTFENNDLLSQNVDVEAILTDKISKSAKKDRILAQYPNQKSTGIFAEFLKLIVGNQADFKKYFNLEDKTPLQFAKDSYDEDLENLLRQIGDEFADLFSAAKKLYDSVLLSGILTVIDLSTKAPLSASMIQRYDEHREDLKQLKQFVKASLPEKYQEIFADSSKDGYAGYIEGKTNQEAFYKYLSKLLTKQEDSENFLEKIKNEDFLRKQRTFDNGSIPHQVHLTELKAIIRRQSEYYPFLKENQDRIEKILTFRIPYYIGPLAREKSDFAWMTRKTDDSIRPWNFEDLVDKEKSAEAFIHRMTNNDFYLPEEKVLPKHSLIYEKFTVYNELTKVRYKNEQGETYFFDSNIKQEIFDGVFKEHRKVSKKKLLDFLAKEYEEFRIVDVIGLDKENKAFNASLGTYHDLEKILDKDFLDNPDNESILEDIVQTLTLFEDREMIKKRLENYKDLFTESQLKKLYRRHYTGWGRLSAKLINGIRDKESQKTILDYLIDDGRSNRNFMQLINDDGLSFKSIISKAQAGSHSDNLKEVVGELAGSPAIKKGILQSLKIVDELVKVMGYEPEQIVVEMARENQTTNQGRRNSRQRYKLLDDGVKNLASNILKEYPTDNQALQNERLFLYYLQNGRDMYTGEALDIDNLSQYDIDHIIPQAFIKDDSIDNRVLVSSAKNRGKSDDVPSLEIVKDCKVFWKKLLDAKLMSQRKYDNLTKAERGGLTSDDKARFIQRQLVETRQITKHVARILDERFNNELDSKGRRIRKVKIVTLKSNLVSNFRKEFGFYKIREVNNYHHAHDAYLNAVVAKAILTKYPQLEPEFVYGDYPKYNSYKTRKATEKLFFYSNIMNFFKTKVTLADGTVVVKDDIEVNNDTGEIVWDKKKHFATVRKVLSYPQNNIVKKTEIQTGGFSKESILAHGNSDKLIPRKTKDIYLDPKKYGGFDSPIVAYSVLVVADIKKGKAQKLKTVTELLGITIMERSRFEKNPSAFLESKGYLNIRADKLIILPKYSLFELENGRRRLLASAGELQKGNELALPTQFMKFLYLASRYNESKGKPEEIEKKQEFVNQHVSYFDDILQLINDFSKRVILADANLEKINKLYQDNKENISVDELANNIINLFTFTSLGAPAAFKFFDKIVDRKRYTSTKEVLNSTLIHQSITGLYETRIDLGKLGED

SEQ ID NO: 55 - protein, 1365 aa, Streptococcus agalactiae
MNKPYSIGLDIGTNSVGWSIITDDYKVPAKKMRVLGNTDKEYIKKNLIGALLFDGGNTAADRRLKRTARRRYTRRRNRILYLQEIFAEEMSKVDDSFFHRLEDSFLVEEDKRGSKYPIFATMQEEKDYHEKFPTIYHLRKELADKKEKADLRLVYLALAHIIKFRGHFLIEDDRFDVRNTDIQKQYQAFLEIFDTSFENNHLLSQNVDVEAILTDKISKSAKKDRILAQYPNQKSTGIFAEFLKLIVGNQADFKKHFNLEDKTPLQFAKDSYDEDLENLLGQIGDEFADLFSAAKKLYDSVLLSGILTVTDLSTKAPLSAYMIQRYDEHREDLKQLKQFVKASLPEKYQEIFADSSKDGYAGYIEGKTNQEAFYKYLSKLLTKQEDSEYFLEKIKNEDFLRKQRTFDNGSIPHQVHLTELKAIIRRQSEYYPFLKENQDKIEKILTFRIPYYVGPLARGNSDFAWMTRKTDDSIRPWNFEDLVDKEKSAEAFIHRMTNNDLYLPEEKVLPKHSLIYEKFTVYNELTKVRYKNEQGETYFFDSNVKQEIFDGVFKEHRKVSKKQLLDFLAKEFEEFRIVDVTGLDKENKAFNASLGTYHDLKKILDKDFLDNPDNESILEDIVQTITLFEDREMIKKRLENYKDLFTESQLKKLYRRHYTGWGRLSAKLINGIRDRESQKTILDYLISDGRANRNFMQLINDDGLSFKSIISKAQSGSHSDNLKEVVGELAGSPAIKKGILQSLKIVDELVKVMGYEPEQIVVEMARENQTTNQGRRNSRQRYKLLEDGVKNLASDILKEYPTDNQALQNERLFLYYLQNGRDMYTGEALDIDNLSQYDIDHIVPQAFIKDDSIDNRVLVSSAKNRGKSDDVPSIDIVKARKAFWKKLLDAKLISQRKYDNLTKAERGGLTPDDKAGFIQRQLVETRQITKHVARILDERFNNKVDDNNKPIRKVKIVTLKSNLVSNFRKEFGFYKIREVNNYHHAHDAYLNAVVAKAILTKYPQLEPEFVYGDYPKYNSYKTRKATEKLFFYSNIMNFFKTKVTLADETVVVKDDIEVNNETGEIAWDKKKHFATVRKVLSYPQVNIVKKTEVQTGGFSKESILAHSNSDKLIPRKTKDIYLDPKKYGGFDSPIVAYSVLVLADIKKGKAQKLKTVKELIGITIMERERFEKNPSAFLESKGYLNIRTDKLIILPKYSLFELENGRRRLLASAGELQKGNELALPTQYMKFLYLASRYNESKGKPEEIEKKQEFVNQHISYFDDILQLINDFSKRVILADANLEKINKLYSDNKDNTPVDELAKNIINLFTFTSLGAPAAFKFFDKSVDRKRYTSTKEVLDSTLIHQSITGLYETRIDLGKLGED

SEQ ID NO: 56 - protein, 1365 aa, Streptococcus agalactiae
MNKPYSIGLDIGTNSVGWSIITDDYKVPAKKMRVLGNTDKEYIKKNLIGALLFDGGNTAADRRLKRTARRRYTRRRNRILYLQEIFAEEMSKVDDSFFHRLEDSFLVEEDKRGSKYPIFATMQEEKYYHEKFPTIYHLRKELADKKEKADLRLIYLALAHIIKFRGHFLIEDDRFDVRNTDIQKQYQAFLEIFDTTFENNDLLSQNVDVEAILTDKISKSAKKDRILARYPNQKSTGIFAEFLKLIVGNQADFKKHFNLEDKTPLQFAKDSYDEDLENLLGQIGDEFADLFSAAKKLYDSVLLSGILTVTDLSTKAPLSASMIQHYDEHREDLKQLKQFVKASLPEKYQEIFADSSKDGYAGYIEGKTNQEAFYKYLSKLLTKQEGSEYLLEKIKNEDFLRKQRTFDNGSIPHQVHLTELRAIIRRQSEYYPFLKENLDRIEKILTFRIPYYVGPLAREKSDFAWMTRKTDDSIRPWNFEDLVDKEKSAEAFIHRMTNNDLYLPEEKVLPKHSLIYEKFTVYNELTKVRFLAEGFKDFQFLNRKQKETIFNSLFKEKRKVTEKDIISFLNKVDGYEGIAIKGIEKQFNASLSTYHDLKKILGKDFLDNTDNELILEDIVQTLTLFEDREMIRKRLDIYKDFFTESQLKKLYRRHYTGWGRLSAKLINGIRNKENQKTILDYLIDDGSANRNFMQLIKDAGLSFKPIIDKARTGSHSDNLKEVVGELAGSPAIKKGILQSLKIVDELVKVMGYEPEQIVVEMARENQTTAKGLSRSRQRLTTLRESLANLKSEKKPKYVKDQVENHHLSDDRLFLYYLQNGKDMYTDDELDIDNLSQYDIDHIIPQAFIKDDSIDNRVLVSSAKNRGKSDDVPSVEIVKDCKVFWKKLLDAKLMSQRKYDNLTKAERGGLTSDDKARFIQRQLVETRQITKHVARILDERFNNELDSKGRRIRKVKIVTLKSNLVSNFRKEFGFYKIREVNNYHHAHDAYLNAVVAKAILTKYPQLEPEFVYGDYPKYNSYKTRKATEKLFFYSNIMNFFKTKVTLADGTVVVKDDIEVNNDTGEIVWDKKKHFATVRKVLSYPQVNIVKKTEIQTGGFSKESILAHGNSDKLIPRKTKDIYLDPKKYGGFDSPIVAYSVLVVADIKKGKAQKLKTVTELLGITIMERSRFEKNPSAFLESKGYLNIRDDKLMILPKYSLFELENGRRRLLASAGELQKGNELALPTQFMKFLYLASRYNELKGKPEEIEQKQEFVVQHVSYFDDILQIINDFSNRVILADANLEKINKLYQDNKENIPVDELANNIINLFTFTSLGAPAAFKFFDKIVDRKRYTSTKEVLNSTLIHQSITGLYETRIDLGKLGED

SEQ ID NO: 57 - protein, 1365 aa, Streptococcus agalactiae
MNKPYSIGLDIGTNSVGWSIITDDYKVPAKKMRVLGNTDKEYIKKNLIGALLFDGGNTAADRRLKRTARRRYTRRRNRILYLQEIFAEEMSKVDDSFFHRLEDSFLVEEDKRGSKYPIFATMQEEKYYHEKFPTIYHLRKELADKKEKADLRLIYLALAHIIKFRGHFLIEDDRFDVRNTDIQKQYQAFLEIFDTTFENNDLLSQNVDVEAILTDKISKSAKKDRILARYPNQKSTGIFAEFLKLIVGNQADFKKHFNLEDKTPLQFAKDSYDEDLENLLGQIGDEFADLFSAAKKLYDSVLLSGILTVTDLSTKAPLSASMIQRYDEHREDLKQLKQFVKASLPEKYQEIFADSSKDGYAGYIEGKTNQEAFYKYLSKLLTKQEGSEYLLEKIKNEDFLRKQRTFDNGSIPHQVHLTELRAIIRRQSEYYPFLKENLDRIEKILTFRIPYYVGPLAREKSDFAWMTRKTDDSIRPWNFEDLVDKEKSAEAFIHRMTNNDLYLPEEKVLPKHSLIYEKFTVYNELTKVRFLAEGFKDFQFLNRKQKETIFNSLFKEKRKVTEKDIISFLNKVDGYEGIAIKGIEKQFNASLSTYHDLKKILGKDFLDNTDNELILEDIVQTLTLFEDREMIRKRLDIYKDFFTESQLKKLYRRHYTGWERLSAKLINGIRNKENQKTILDYLIDDGSANRNFMQLIKDAGLSFKPIIDKARTGSHLDNLKEVVGELAGSPAIKKGILQSLKIVDELVKVMGYEPEQIVVEMARENQTTAKGLSRSRQRLTTLRESLANLKSEKKPKYVKDQVENHHLSDDRLFLYYLQNGKDMYTDDELDIDNLSQYDIDHIIPQAFIKDDSIDNRVLVSSAKNRGKSDDVPSLEIVKDCKVFWKKLLDAKLMSQRKYDNLTKAERGGLTSDDKARFIQRQLVETRQITKHVARILDERFNNELDSKGRRIRKVKIVTLKSNLVSNFRKEFGFYKIREVNNYHHAHDAYLNAVVAKAILTKYPQLEPEFVYGDYPKYNSYKTRKATEKLFFYSNIMNFFKTKVTLADGTVVVKDDIEVNNDTGEIVWDKKKHFATVRKVLSYPQVNIVKKTEVQTGGFSKESILAHGNSDKLIPRKTKDIYLDPKKYGGFDSPIVAYSVLVVADIKKGKAQKLKTVTELLGITIMERSRFEKNPSAFLESKGYLNIRTDKLIILPKYSLFELENGRRRLLASAGELQKGNELALPTQYMKFLYLASRYNELKGKPEEIEQKQEFVVQHVSYFDDILQIINDFSNRVILADANLEKINKLYQDNKENIPVDELANNIINLFTFTSLGAPAAFKFFDKIVDRKRYTSTKEVLNSTLIHQSITGLYETRIDLGKLGEG

SEQ ID NO: 58 - protein, 1365 aa, Streptococcus agalactiae
MNKPYSIGLDIGTNSVGWSIITDDYKVPAKKMRVLGNTDKEYIKKNLIGALLFDGGNTAADRRLKRTARRRYTRRRNRILYLQEIFAEEMSKVDDSFFHRLEDSFLVEEDKRGSKYPIFATMQEEKYYHEKFPTIYHLRKELADKKEKADLRLIYLALAHIIKFRGHFLIEDDRFDVRNTDIQKQYQAFLEIFDTTFENNDLLSQNVDVEAILTDKISKSAKKDRILARYPNQKSTGIFAEFLKLIVGNQADFKKHFNLEDKTPLQFAKDSYDEDLENLLGQIGDEFADLFSAAKKLYDSVLLSGILTVTDLSTKAPLSASMIQRYDEHREDLKQLKQFVKASLPEKYQEIFADSSKDGYAGYIEGKTNQEAFYKYLSKLLTKQEGSEYLLEKIKNEDFLRKQRTFDNGSIPHQVHLTELRAIIRRQSEYYPFLKENLDRIEKILTFRIPYYVGPLAREKSDFAWMTRKTDDSIRPWNFEDLVDKEKSAEAFIHRMTNNDLYLPEEKVLPKHSLIYEKFTVYNELTKVRFLAEGFKDFQFLNRKQKETIFNSLFKEKRKVTEKDIISFLNKVDGYEGIAIKGIEKQFNASLSTYHDLKKILGKDFLDNTDNELILEDIVQTLTLFEDREMIRKRLDIYKDFFTESQLKKLYRRHYTGWGRLSAKLINGIRNKENQKTILDYLIDDGSANRNFMQLIKDAGLSFKPIIDKARTGSHLDNLKEVVGELAGSPAIKKGILQSLKIVDELVKVMGYEPEQIVVEMARENQTTAKGLSRSRQRLTTLRESLANLKSEKKPKYVKDQVENHHLSDDRLFLYYLQNGKDMYTDDELDIDNLSQYDIDHIIPQAFIKDDSIDNRVLVSSAKNRGKSDDVPSLEIVKDCKVFWKKLLDAKLMSQRKYDNLTKAERGGLTSDDKARFIQRQLVETRQITKHVARILDERFNNELDSKGRRIRKVKIVTLKSNLVSNFRKEFGFYKIREVNNYHHAHDAYLNAVVAKAILTKYPQLEPEFVYGDYPKYNSYKTRKATEKLFFYSNIMNFFKTKVTLADGTVVVKDDIEVNNDTGEIVWDKKKHFATVRKVLSYPQVNIVKKTEVQTGGFSKESILAHGNSDKLIPRKTKDIYLDPKKYGGFDSPIVAYSVLVVADIKKGKAQKLKTVTELLGITIMERSRFEKNPSAFLESKGYLNIRTDKLIILPKYSLFELENGRRRLLASAGELQKGNELALPTQYMKFLYLASRYNELKGKPEEIEQKQEFVVQHVSYFDDILQIINDFSNRVILADANLEKINKLYQDNKENIPVDELANNIINLFTFTSLGAPAAFKFFDKIVDRKRYTSTKEVLNSTLIHQSITGLYETRIDLGKLGEG

SEQ ID NO: 59 - protein, 1365 aa, Streptococcus agalactiae
MNKPYSIGLDIGTNSVGWSIITDDYKVPAKKMRVLGNTDKEYIKKNLIGALLFDGGNTAADRRLKRTARRRYTRRRNRILYLQEIFAEEMSKVDDSFFHRLEDSFLVEEDKRGSKYPIFATMQEEKYYHEKFPTIYHLRKELADKKEKADLRLIYLALAHIIKFRGHFLIEDDRFDVRNTDIQKQYQAFLEIFDTTFENNDLLSQNVDVEAILTDKISKSAKKDRILARYPNQKSTGIFAEFLKLIVGNQADFKKHFNLEDKTPLQFAKDSYDEDLENLLGQIGDEFADLFSAAKKLYDSVLLSGILTVTDLSTKAPLSASMIQRYDEHREDLKQLKQFVKASLPEKYQEIFADSSKDGYAGYIEGKTNQEAFYKYLSKLLTKQEGSEYLLEKIKNEDFLRKQRTFDNGSIPHQVHLTELRAIIRRQSEYYPFLKENLDRIEKILTFRIPYYVGPLAREKSDFAWMTRKTDDSIRPWNFEDLVDKEKSAEAFIHRMTNNDLYLPEEKVLPKHSLIYEKFTVYNELTKVRFLAEGFKDFQFLNRKQKETIFNSLFKEKRKVTEKDIISFLNKVDGYEGIAIKGIEKQFNASLSTYHDLKKILGKDFLDNTDNELILEDIVQTLTLFEDREMIRKRLDIYKDFFTESQLKKLYRRHYTGWGRLSAKLINGIRNKENQKTILDYLIDDGSANRNFMQLIKDAGLSFKPIIDKARTGSHSDNLKEVVGELAGSPAIKKGILQSLKIVDELVKVMGYEPEQIVVEMARENQTTAKGLSRLRQRLTTLRESLANLKSEKKPKYVKDQVENHHLSDDRLFLYYLQNGKDMYTDDELDIDNLSQYDIDHIIPQAFIKDDSIDNRVLVSSAKNRGKSDDVPSVEIVKDCKVFWKKLLDAKLMSQRKYDNLTKAERGGLTSDDKARFIQRQLVETRQITKHVARILDERFNNELDSKGRRIRKVKIVTLKSNLVSNFRKEFGFYKIREVNNYHHAHDAYLNAVVAKAILTKYPQLEPEFVYGDYPKYNSYKTRKATEKLFFYSNIMNFFKTKVTLADGTVVVKDDIEVNNDTGEIVWDKKKHFATVRKVLSYPQVNIVKKTEIQTGGFSKESILAHGNSDKLIPRKTKDIYLDPKKYGGFDSPIVAYSVLVVADIKKGKAQKLKTVTELLGITIMERSRFEKNPSAFLESKGYLNIRDDKLMILPKYSLFELENGRRRLLASADELQKGNELALPTQFMKFLYLASRYNELKGKPEEIEQKQEFVVQHVSYFDDILQIINDFSNRVILADANLEKINKLYQDNKENIPVDELANNIINLFTFTSLGAPAAFKFFDKIVDRKRYTSTKEVLNSTLIHQSITGLYETRIDLGKLGED

SEQ ID NO: 60 - protein, 1365 aa, Streptococcus agalactiae
MNKPYSIGLDIGTNSVGWSIITDDYKVPAKKMRVLGNTDKEYIKKNLIGALLFDGGNTAADRRLKRTARRRYTRRRNRILYLQEIFAEEMSKVDDSFFHRLEDSFLVEEDKRGSKYPIFATMQEEKYYHEKFPTIYHLRKELADKKEKADLRLIYLALAHIIKFRGHFLIEDDRFDVRNTDIQKQYQAFLEIFDTTFENNDLLSQNVDVEAILTDKISKSAKKDRILARYPNQKSTGIFAEFLKLIVGNQADFKKHFNLEDKTPLQFAKDSYDEDLENLLGQIGDEFADLFSAAKKLYDSVLLSGILTVTDLSTKAPLSASMIQRYDEHREDLKQLKQFVKASLPEKYQEIFADSSKDGYAGYIEGKTNQEAFYKYLSKLLTKQEGSEYLLEKIKNEDFLRKQRTFDNGSIPHQVHLTELRAIIRRQSEYYPFLKENLDRIEKILTFRIPYYVGPLAREKSDFAWMTRKTDDSIRPWNFEDLVDKEKSAEAFIHRMTNNDLYLPEEKVLPKHSLIYEKFTVYNELTKVRFLAEGFKDFQFLNRKQKETIFNSLFKEKRKVTEKDIISFLNKVDGYEGIAIKGIEKQFNASLSTYHDLKKILGKDFLDNTDNELILEDIVQTLTLFEDREMIRKRLDIYKDFFTESQLKKLYRRHYTGWGRLSAKLINGIRNKENQKTILDYLIDDGSANRNFMQLIKDAGLSFKPIIDKARTGSHSDNLKEVVGELAGSPAIKKGILQSLKIVDELVKVMGYEPEQIVVEMARENQTTAKGLSRSRQRLTTLRESLANLKSEKKPKYVKDQVENHHLSDDRLFLYYLQNGKDMYTDDELDIDNLSQYDIDHIIPQAFIKDDSIDNRVLVSSAKNRGKSDDVPSVEIVKDCKVFWKKLLDAKLMSQRKYDNLTKAERGGLTSDDKARFIQRQLVETRQITKHVARILDERFNNELDSKGRRIRKVKIVTLKSNLVSNFRKEFGFYKIREVNNYHHAHDAYLNAVVAKAILTKYPQLEPEFVYGDYPKYNSYKTRKATEKLFFYSNIMNFFKTKVTLADGTVVVKDDIEVNNDTGEIVWDKKKHFATVRKVLSYPQVNIVKKTEIQTGGFSKESILAHGNSDKLIPRKTKDIYLDPKKYGGFDSPIVAYSVLVVADIKKGKAQKLKTVTELLGITIMERSRFEKNPSAFLESKGYLNIRDDKLMILPKYSLFELENGRRRLLASAGELQKGNELALPTQFMKFLYLASRYNELKGKPEEIEQKQEFVVQHVSYFDDILQIINDFSNRVILADANLEKINKLYQDNKENIPVDELANNIINLFTFTSLGAPAAFKFFDKIVDRKRYTSTKEVLNSTLIHQSITGLYETRIDLGKLGED

SEQ ID NO: 61 - protein, 1365 aa, Streptococcus agalactiae
MNKPYSIGLDIGTNSVGWSIITDDYKVPAKKMRVLGNTDKEYIKKNLIGALLFDGGNTAADRRLKRTARRRYTRRRNRILYLQEIFAEEMSKVDDSFFHRLEDSFLVEEDKRGSKYPIFATMQEEKYYHEKFPTIYHLRKELADKKEKADLRLIYLALAHIIKFRGHFLIEDDRFDVRNTDIQKQYQAFLEIFDTTFENNDLLSQNVDVEAILTDKISKSAKKDRILARYPNQKSTGIFAEFLKLIVGNQADFKKHFNLEDKTPLQFAKDSYDEDLENLLGQIGDEFADLFSAAKKLYDSVLLSGILTVTDLSTKAPLSASMIQRYDEHREDLKQLKQFVKASLPEKYQEIFADSSKDGYAGYIEGKTNQEAFYKYLSKLLTKQEGSEYLLEKIKNEDFLRKQRTFDNGSIPHQVHLTELRAIIRRQSEYYPFLKENLDRIEKILTFRIPYYVGPLAREKSDFAWMTRKTDDSIRPWNFEDLVDKEKSAEAFIHRMTNNDLYLPEEKVLPKHSLIYEKFTVYNELTKVRFLAEGFKDFQFLNRKQKETIFNSLFKEKRKVTEKDIISFLNKVDGYEGIAIKGIEKQFNASLSTYHDLKKILGKDFLDNTDNELILEDIVQTLTLFEDREMIRKRLDIYKDFFTESQLKKLYRRHYTGWGRLSAKLINGIRNKENQKTILDYLIDDGSANRNFMQLIKDAGLSFKPIIDKARTGSHSDNLKEVVGELAGSPAIKKGILQSLKIVDELVKVMGYEPEQIVVEMARENQTTAKGLSRSRQRLTTLRESLANLKSEKKPKYVKDQVENHHLSDDRLFLYYLQNGKDMYTDDELDIDNLSQYDIDHIIPQAFIKDDSIDNRVLVSSAKNRGKSDDVPSVEIVKDCKVFWKKLLDAKLMSQRKYDNLTKAERGGLTSDDKARFIQRQLVETRQITKHVARILDERFNNELDSKGRRIRKVKIVTLKSNLVSNFRKEFGFYKIREVNNYHHAHDAYLNAVVAKAILTKYPQLEPEFVYGDYPKYNSYKTRKATEKLFFYSNIMNFFKTKVTLADGTVVVKDDIEVNNDTGEIVWDKKKHFATVRKVLSYPQVNIVKKTEIQTGGFSKESILAHGNSDKLIPRKTKDIYLDPKKYGGFDSPKVAYSVLVVADIKKGKAQKLKTVTELLGITIMERSRFEKNPSAFLESKGYLNIRDDKLMILPKYSLFELENGRRRLLASAGELQKGNELALPTQFMKFLYLASRYNELKGKPEEIEQKQEFVVQHVSYFDDILQIINDFSNRVILADANLEKINKLYQDNKENIPVDELANNIINLFTFTSLGAPAAFKFFDKIVDRKRYTSTKEVLNSTLIHKSITGLYETRIDLGKLGED

SEQ ID NO: 62 - protein, 1365 aa, Streptococcus agalactiae
MNKPYSIGLDIGTNSVGWSIITDDYKVPAKKMRVLGNTDKEYIKKNLIGALLFDGGNTAADRRLKRTARRRYTRRRNRILYLQEIFAEEMSKVDDSFFHRLEDSFLVEEDKRGSKYPIFATMQEEKYYHEKFPTIYHLRKELADKKEKADLRLIYLALAHIIKFRGHFLIEDDRFDVRNTDIQKQYQAFLEIFDTTFENNDLLSQNVDVEAILTDKISKSAKKDRILARYPNQKSTGIFAEFLKLIVGNQADFKKHFNLEDKTPLQFAKDSYDEDLENLLGQIGDEFADLFSAAKKLYDSVLLSGILTVTDLSTKAPLSASMIQRYDEHREDLKQLKQFVKASLPEKYQEIFADSSKDGYAGYIEGKTNQEAFYKYLSKLLTKQEGSEYLLEKIKNEDFLRKQRTFDNGSIPHQVHLTELRAIIRRQSEYYPLLKENLDRIEKILTFRIPYYVGPLAREKSDFAWMTRKTDDSIRPWNFEDLVDKEKSAEAFIHRMTNNDLYLPEEKVLPKHSLIYEKFTVYNELTKVRFLAEGFKDFQFLNRKQKETIFNSLFKEKRKVTEKDIISFLNKVDGYEGIAIKGIEKQFNASLSTYHDLKKILGKDFLDNTDNELILEDIVQTLTLFEDREMIRKRLDIYKDFFTESQLKKLYRRHYTGWGRLSAKLINGIRNKENQKTILDYLIDDGSANRNFMQLIKDAGLSFKPIIDKARTGSHSDNLKEVVGELAGSPAIKKGILQSLKIVDELVKVMGYEPEQIVVEMARENQTTAKGLSRSRQRLTTLRESLANLKSEKKPKYVKDQVENHHLSDDRLFLYYLQNGKDMYTDDELDIDNLSQYDIDHIIPQAFIKDDSIDNRVLVSSAKNRGKSDDVPSVEIVKDCKVFWKKLLDAKLMSQRKYDNLTKAERGGLTSDDKARFIQRQLVETRQITKHVARILDERFNNELDSKGRRIRKVKIVTLKSNLVSNFRKEFGFYKIREVNNYHHAHDAYLNAVVAKAILTKYPQLEPEFVYGDYPKYNSYKTRKATEKLFFYSNIMNFFKTKVTLADGTVVVKDDIEVNNDTGEIVWDKKKHFATVRKVLSYPQVNIVKKTEIQTGGFSKESILAHGNSDKLIPRKTKDIYLDPKKYGGFDSPIVAYSVLVVADIKKGKAQKLKTVTELLGITIMERSRFEKNPSAFLESKGYLDIRDDKLMILPKYSLFELENGRRRLLASAGELQKGNELALPTQFMKFLYLASRYNELKGKPEEIEQKQEFVVQHVSYFDDILQIINDFSNRVILADANLEKINKLYQDNKENIPVDELANNIINLFTFTSLGAPAAFKFFDKIVDRKRYTSTKEVLNSTLIHQSITGLYETRIDLGKLGED

SEQ ID NO: 63 - protein, 1365 aa, Streptococcus agalactiae
  misc_feature (117)..(117): Xaa can be any naturally occurring amino acid
MNKPYSIGLDIGTNSVGWSIITDDYKVPAKKMRVLGNTDKEYIKKNLIGALLFDGGNTAADRRLKRTARRRYTRRRNRILYLQEIFAEEMSKVDDSFFHRLEDSFLVEEDKRGSKYXIFATLQEEKDYHEKFSTIYHLRKELADKKEKADLRLIYIALAHIIKFRGHFLIEDDSFDVRNTDISKQYQDFLEIFNTTFENNDLLSQNVDVEAILTDKISKSAKKDRILAQYPNQKSTGIFAEFLKLIVGNQADFKKYFNLEDKTPLQFAKDSYDEDLENLLGQIGDEFADLFSAAKKLYDSVLLSGILTVIDLSTKAPLSASMIQRYDEHREDLKQLKQFVKASLPEKYQEIFADSSKDGYAGYIEGKTNQEAFYKYLSKLLTKQEDSENFLEKIKNEDFLRKQRTFDNGSIPHQVHLTELKAIIRRQSEYYPFLKENQDRIEKILTFRIPYYIGPLAREKSDFAWMTRKTDDSIRPWNFEDLVDKEKSAEAFIHRMTNNDFYLPEEKVLPKHSLIYEKFTVYNELTKVRYKNEQGETYFFDSNIKQEIFDGVFKEHRKVSKKKLLDFLAKEYEEFRIVDVIGLDKENKAFNASLGTYHDLEKILDKDFLDNPDNESILEDIVQTLTLFEDREMIKKRLENYKDLFTESQLKKLYRRHYTGWGRLSAKLINGIRDKESQKTILDYLIDDGRSNRNFMQLINDDGLSFKSIISKAQAGSHSDNLKEVVGELAGSPAIKKGILQSLKIVDELVKVMGYEPEQIVVEMARENQTTNQGRRNSRQRYKLLDDGVKNLASNILKEYPTDNQALQNERLFLYYLQNGRDMYTGEALDIDNLSQYDIDHIIPQAFIKDDSIDNRVLVSSAKNRGKSDDVPSLEIVKDCKVFWKKLLDAKLMSQRKYDNLTKAERGGLTSDDKARFIQRQLVETRQITKHVARILDERFNNELDSKGRRIRKVKIVTLKSNLVSNFRKEFGFYKIREVNNYHHAHDAYLNAVVAKAILTKYPQLEPEFVYGDYPKYNSYKTRKATEKLFFYSNIMNFFKTKVTLADGTVVVKDDIEVNNDTGEIVWDKKKHFATVRKVLSYPQNNIVKKTEIQTGGFSKESILAHGNSDKLIPRKTKDIYLDPKKYGGFDSPIVAYSVLVVADIKKGKAQKLKTVTELLGITIMERSRFEKNPSAFLESKGYLNIRADKLIILPKYSLFELENGRRRLLASAGELQKGNELALPTQFMKFLYLASRYNESKGKPEEIEKKQEFVNQHVSYFDDILQLINDFSKRVILADANLEKINKLYQDNKENISVDELANNIINLFTFTSLGAPAAFKFFDKIVDRKRYTSTKEVLNSTLIHQSITGLYETRIDLGKLGED

SEQ ID NO: 64 - protein, 1365 aa, Streptococcus agalactiae
MNKPYSIGLDIGTNSVGWSIITDDYKVPAKKMRVLGNTDKEYIKKNLIGALLFDGGNTAADRRLKRTSRRRYTRRRNRILYLQEIFAEEMSKVDDSFFHRLEDSFLVEEDKRGSKYPIFATLQEEKDYHEKFSTIYHLRKELADKKEKADLRLIYIALAHIIKFRGHFLIEDDSFDVRNTDISKQYQDFLEIFNTTFENNDLLSQNVDVEAILTDKISKSAKKDRILAQYPNQKSTGIFAEFLKLIVGNQADFKKYFNLEDKTPLQFAKDSYDEDLENLLGQIGDEFADLFSAAKKLYDSVLLSGILTVIDLSTKAPLSASMIQRYDEHREDLKQLKQFVKASLPEKYQEIFADSSKDGYAGYIEGKTNQEAFYKYLSKLLTKQEDSENFLEKIKNEDFLRKQRTFDNGSIPHQVHLTELKAIIRRQSEYYPFLKENQDRIEKILTFRIPYYIGPLAREKSDFAWMTRKTDDSIRPWNFEDLVDKEKSAEAFIHRMTNNDFYLPEEKVLPKHSLIYEKFTVYNELTKVRYKNEQGETYFFDSNIKQEIFDGVFKEHRKVSKKKLLDFLAKEYEEFRIVDVIGLDKENKAFNASLGTYHDLEKILDKDFLDNPDNESILEDIVQTLTLFEDREMIKKRLENYKDLFTESQLKKLYRRHYTGWGRLSAKLINGIRDKESQKTILDYLIDDGRSNRNFMQLINDDGLSFKSIISKAQAGSHSDNLKEVVGELAGSPAIKKGILQSLKIVDELVKVMGYEPEQIVVEMARENQTTNQGRRNSRQRYKLLDDGVKNLASNILKEYPTDNQALQNERLFLYYLQNGRDMYTGEALDIDNLSQYDIDHIIPQAFIKDDSIDNRVLVSSAKNRGKSDDVPSLEIVKDCKVFWKKLLDAKLMSQRKYDNLTKAERGGLTSDDKARFIQRQLVETRQITKHVARILDERFNNELDSKGRRIRKVKIVTLKSNLVSNFRKEFGFYKIREVNNYHHAHDAYLNAVVAKAILTKYPQLEPEFVYGDYPKYNSYKTRKATEKLFFYSNIMNFFKTKVTLADGTVVVKDDIEVNNDTGEIVWDKKKHFATVRKVLSYPQNNIVKKTEIQTGGFSKESILAHGNSDKLIPRKTKDIYLDPKKYGGFDSPIVAYSVLVVADIKKGKAQKLKTVTELLGITIMERSRFEKNPSAFLESKGYLNIRADKLIILPKYSLFELENGRRRLLASAGELQKGNELALPTQFMKFLYLASRYNESKGKPEEIEKKQEFVNQHVSYFDDILQLINDFSKRVILADANLEKINKLYQDNKENISVDELANNIINLFTFTSLGAPAAFKFFDKIVDRKRYTSTKEVLNSTLIHQSITGLYETRIDLGKLGED

SEQ ID NO: 65 - protein, 1365 aa, Streptococcus agalactiae
MNKPYSIGLDIGTNSVGYSVVTDDYKVPAKKMRVLGNTDKEYIKKNLIGALLFDGGNTASDRRLKRTARRRYTCRRNRILYLQEIFAEEMSKVDDSFFHRLEDSFLVEDDKRGSKYPIFATMQEEKDYHEKFPTIYHLRKELADKKEKANLRLVYLALAHIIKFRGHFLIEDDSFDVRNTDIQRQYQAFLEIFDTTFENNHLLSQNIDVEGILTDKISKSAKKDRILAQYPNQKSTGIFAEFLKLIVGNQADFKKHFNLEDKTPLQFAKDSYDEDLENLLGQIGDEFADLFSVAKKLYDSVLLSGILTVTDLSTKAPLSASMIQRYDEHREDLKQLKQFVKASLPEKYQEIFTDSSKDGYAGYIEGKTNQGAFYKYLSKLLTKQEGSEYFLEKIKNEDFLRKQRTFDNGSIPHQVHLTELKAIIRRQSEYYPFLKENLDRIEKILTFRIPYYVGPLAREKSDFAWMTRKTDDSIRPWNFEELVDKEASAEAFIHRMTNNDLYLPEEKVLPKHSLIYEKFTVYNELTKVRYKNEQGETYFFDSNIKQEIFDGVFKEHRKVSKKKLLDFLAKEYEEFRIVDVIGLDKENKAFNASLGTYHDLKKILDKDFLDNPDNESILEDIVQTLTLFEDREMIKKRLENYKDLFTESQLKKLYRRHYTGWGRLSAKLINGIRDKESQKTILDYLISDGRANRNFMQLIHDDGLSFKPIIDKAQAGSHSDNLKEVVGELAGSPAIKKGILQSLKIVDELVKVMGYEPEQVVVEMARENQTTNQGRRNTRQRYKLLEEGVKNLASNILKEYPTDNQALQNERLFLYYLQNGRDMYTGEALDIDNLSQYDIDHIVPQAFIKDDSIDNRVLVSSAKNRGKSDNVPSIDIVKARKAFWKKLLDAKLMSQRKYDNLTKAERGGLTSDDKARFIQRQLVETRQITKHVARILDERFNNELDSKGRRIRKVKIVTLKSNLVSNFRKEFGFYKIREVNDYHHAHDAYLNAVVAKAILTKYPQLEPEFVYGDYPKYNSYKTRKATEKLFFYSNIMNFFKTKVTLADGTVVVKDDIEVNNDTGEIVWDKKKHFATVRKVLSYPQVNIVKKTEIQTGGFSKESILAHGNSDKLIPRKTKDIYLDPKKYGGFDSPIVAYSVLVVADIKKGKAQKLKTVTELLGITIMERFRFEKNPSAFLESKGYLNIRDDKLMILPKYSLFELENGRRRLLASAGELQKGNELALPTQYMKFLYLASRYNELKGKPEEIEQKQEFVVQHVSYFDDILQIINDFSNRVILADANLEKINKLYQDNKENISVDELANNIINLFTFTSLGAPAAFKFFDKIVDRKRYTSTKEVLNSTLIHQSITGLYETRIDLGKLGED

SEQ ID NO: 66 - protein, 1365 aa, Streptococcus agalactiae
MNKPYSIGLDIGTNSVGYSVVTDDYKVPAKKMRVLGNTDKEYIKKNLIGALLFDGGNTASDRRLKRTARRRYTRRRNRILYLQEIFAEEMSKVDDSFFHRLEDSFLVEDDKRGSKYPIFATMQEEKDYHEKFPTIYHLRKELADKKEKADLRLVYLALAHIIKFRGHFLIEDDSFDVRNTDIQRQYQAFLEIFDTTFENNHLLSQNIDVEGILTDKISKSAKKDRILAQYPNQKSTGIFAEFLKLIVGNQADFKKHFNLEDKTPLQFAKDSYDEDLENLLGQIGDEFADLFSVAKKLYDSVLLSGILTVTDLSTKAPLSASMIQRYDEHREDLKQLKQFVKASLPEKYQEIFTDSSKDGYAGYIEGKTNQGAFYKYLSKLLTKQEGSEYFLEKIKNEDFLRKQRTFDNGSIPHQVHLTELKAIIRRQSEYYPFLKENLDRIEKILTFRIPYYVGPLAREKSDFAWMTRKTDDSIRPWNFEELVDKEASAEAFIHRMTNNDLYLPEEKVLPKHSLIYEKFTVYNELTKVRYKNEQGETYFFDSNIKQEIFDGVFKEHRKVSKKKLLDFLAKEYEEFRIVDVIGLDKENKAFNASLGTYHDLKKILDKDFLDNPDNESILEDIVQTLTLFEDREMIKKRLENYKDLFTESQLKKLYRRHYTGWGRLSAKLINGIRDKESQKTILDYLISDGRANRNFMQLIHDDGLSFKPIIDKAQAGSHSDNLKEVVGELAGSPAIKKGILQSLKIVDELVKVMGYEPEQVVVEMARENQTTNQGRRNTRQRYKLLEEGVKNLASNILKEYPTDNQALQNERLFLYYLQNGRDMYTGEALDIDNLSQYDIDHIVPQAFIKDDSIDNRVLVSSAKNRGKSDNVPSIDIVKARKAFWKKLLDAKLMSQRKYDNLTKAERGGLTSDDKARFIQRQLVETRQITKHVARILDERFNNELDSKGRRIRKVKIVTLKSNLVSNFRKEFGFYKIREVNDYHHAHDAYLNAVVAKAILTKYPQLEPEFVYGDYPKYNSYKTRKATEKLFFYSNIMNFFKTKVTLADGTVVVKDDIEVNNDTGEIVWDKKKHFATVRKVLSYPQVNIVKKTEIQTGGFSKESILAHGNSDKLIPRKTKDIYLDPKKYGGFDSPIVAYSVLVVADIKKGKAQKLKTVTELLGITIMERFRFEKNPSAFLESKGYLNIRDDKLMILPKYSLFELENGRRRLLASAGELQKGNELALPTQYMKFLYLASRYNELKGKPEEIEQKQEFVVQHVSYFDDILQIINDFSNRVILADANLEKINKLYQDNKENISVDELANNIINLFTFTSLGAPAAFKFFDKIVDRKRYTSTKEVLNSTLIHQSITGLYETRIDLGKLGED

SEQ ID NO: 67 - protein, 1365 aa, Streptococcus agalactiae
MNKPYSIGLDIGTNSVGYSVVTDDYKVPAKKMRVLGNTDKEYIKKNLIGALLFDGGNTASDRRLKRTARRRYTRRRNRILYLQEIFAEEMSKVDDSFFHRLEDSFLVEDDKRGSKYPIFATMQEEKDYHEKFPTIYHLRKELADKKEKADLRLVYLALAHIIKFRGHFLIEDDSFDVRNTDIQRQYQAFLEIFDTTFENNHLLSQNIDVEGILTDKISKSAKKDRILAQYPNQKSTGIFAEFLKLIVGNQADFKKHFNLEDKTPLQFAKDSYDEDLENLLGQIGDEFADLFSVAKKLYDSVLLSGILTVTDLSTKAPLSASMIQRYDEHREDLKQLKQFVKASLPEKYQEIFTDSSKDGYAGYIEGKTNQGAFYKYLSKLLTKQEGSEYFLEKIKNEDFLRKQRTFDNGSIPHQVHLTELKAIIRRQSEYYPFLKENLDRIEKILTFRIPYYVGPLAREKSDFAWMTRKTDDSIRPWNFEELVDKEASAEAFIHRMTNNDLYLPEEKVLPKHSLIYEKFTVYNELTKVRYKNEQGETYFFDSNIKQEIFDGVFKEHRKVSKKKLLDFLAKEYEEFRIVDVIGLDKENKAFNASLGTYHDLKKILDKDFLDNPDNESILEDIVQTLTLFEDREMIKKRLENYKDLFTESQLKKLYRRHYTGWGRLSAKLINGIRDKESQKTILDYLISDGRANRNFMQLIHDDGLSFKPIIDKAQAGSHSDNLKEVVGELAGSPAIKKGILQSLKIVDELVKVMGYEPEQVVVEMARENQTTNQGRRNTRQRYKLLEEGVKNLASNILKEYPTDNQALQNERLFLYYLQNGRDMYTGETLDIDNLSQYDIDHIVPQAFIKDDSIDNRVLVSSAKNRGKSDNVPSIDIVKARKAFWKKLLDAKLMSQRKYDNLTKAERGGLTSDDKARFIQRQLVETRQITKHVARILDERFNNELDSKGRRIRKVKIVTLKSNLVSNFRKEFGFYKIREVNDYHHAHDAYLNAVVAKAILTKYPQLEREFVYGDYPKYNSYKTRKATEKLFFYSNIMNFFKTKVTLADGTVVVKDDIEVNNDTGEIVWDKKKHFATVRKVLSYPQVNIVKKTEIQTGGFSKESILAHGNSDKLIPRKTKDIYLDPKKYGGFDSPIVAYSVLVVADIKKGKAQKLKTVTELLGITIMERFRFEKNPSAFLESKGYLNIRDDKLMILPKYSLFELENGRRRLLASAGELQKGNELALPTQYMKFLYLASRYNELKGKPEEIEQKQEFVVQHVSYFDDILQIINDFSNRVILADANLEKINKLYQDNKENISVDELANNIINLFTFTSLGAPAAFKFFDKIVDRKRYTSTKEVLNSTLIHQSITGLYETRIDLGKLGED

SEQ ID NO: 68 - protein, 1365 aa, Streptococcus agalactiae
MNKPYSIGLDIGTNSVGYSVVTDDYKVPAKKMRVLGNTDKEYIKKNLIGALLFDGGNTASDRRLKRTARRRYTRRRNRILYLQEIFAEEMSKVDDSFFHRLEDSFLVEDDKRGSKYPIFATMQEEKDYHEKFPTIYHLRKELADKKEKANLRLVYLALAHIIKFRGHFLIEDDSFDVRNTDIQRQYQAFLEIFDTTFENNHLLSQNIDVEGILTDKISKSAKKDRILAQYPNQKSTGIFAEFLKLIVGNQADFKKHFNLEDKTPLQFAKDSYDEDLENLLGQIGDEFADLFSVAKKLYDSVLLSGILTVTDLSTKAPLSASMIQRYDEHREDLKQLKQFVKASLPEKYQEIFTDSSKDGYAGYIEGKTNQGAFYKYLSKLLTKQEGSEYFLEKIKNEDFLRKQRTFDNGSIPHQVHLTELKAIIRRQSEYYPFLKENLDRIEKILTFRIPYYVGPLAREKSDFAWMTRKTDDSIRPWNFEELVDKEASAEAFIHRMTNNDLYLPEEKVLPKHSLIYEKFTVYNELTKVRYKNEQGETYFFDSNIKQEIFDGVFKEHRKVSKKKLLDFLAKEYEEFRIVDVIGLDKENKAFNASLGTYHDLKKILDKDFLDNPDNESILEDIVQTLTLFEDREMIKKRLENYKDLFTESQLKKLYRRHYTGWGRLSAKLINGIRDKESQKTILDYLISDGRANRNFMQLIHDDGLSFKPIIDKAQAGSHSDNLKEVVGELAGSPAIKKGILQSLKIVDELVKVMGYEPEQVVVEMARENQTTNQGRRNTRQRYKLLEEGVKNLASNILKEYPTDNQALQNERLFLYYLQNGRDMYTGEALDIDNLSQYDIDHIVPQAFIKDDSIDNRVLVSSAKNRGKSDNVPSIDIVKARKAFWKKLLDAKLMSQRKYDNLTKAERGGLTSDDKARFIQRQLVETRQITKHVARILDERFNNELDSKGRRIRKVKIVTLKSNLVSNFRKEFGFYKIREVNDYHHAHDAYLNAVVAKAILTKYPQLEPEFVYGDYPKYNSYKTRKATEKLFFYSNIMNFFKTKVTLADGTVVVKDDIEVNNDTGEIVWDKKKHFATVRKVLSYPQVNIVKKTEIQTGGFSKESILAHGNSDKLIPRKTKDIYLDPKKYGGFDSPIVAYSVLVVADIKKGKAQKLKTVTELLGITIMERFRFEKNPSAFLESKGYLNIRDDKLMILPKYSLFELENGRRRLLASAGELQKGNELALPTQYMKFLYLASRYNELKGKPEEIEQKQEFVVQHVSYFDDILQIINDFSNRVILADANLEKINKLYQDNKENISVDELANNIINLFTFTSLGAPAAFKFFDKIVDRKRYTSTKEVLNSTLIHQFITGLYETRIDLGKLGED

SEQ ID NO: 69 - protein, 1365 aa, Streptococcus agalactiae
MNKPYSIGLDIGTNSVGYSVVTDDYKVPAKKMRVLGNTDKEYIKKNLIGALLFDGGNTASDRRLKRTARRRYTRRRNRILYLQEIFAEEMSKVDDSFFHRLEDSFLVEDDKRGSKYPIFATMQEEKDYHEKFPTIYHLRKELADKKEKANLRLVYLALAHIIKFRGHFLIEDDSFDVRNTDIQRQYQAFLEIFDTTFENNHLLSQNIDVEGILTDKISKSAKKDRILAQYPNQKSTGIFAEFLKLIVGNQADFKKHFNLEDKTPLQFAKDSYDEDLENLLGQIGDEFADLFSVAKKLYDSVLLSGILTVTDLSTKAPLSASMIQRYDEHREDLKQLKQFVKASLPEKYQEIFTDSSKDGYAGYIEGKTNQGAFYKYLSKLLTKQEGSEYFLEKIKNEDFLRKQRTFDNGSIPHQVHLTELKAIIRRQSEYYPFLKENLDRIEKILTFRIPYYVGPLAREKSDFAWMTRKTDDSIRPWNFEELVDKEASAEAFIHRMTNNDLYLPEEKVLPKHSLIYEKFTVYNELTKVRYKNEQGETYFFDSNIKQEIFDGVFKEHRKVSKKKLLDFLAKEYEEFRIVDVIGLDKENKAFNASLGTYHDLKKILDKDFLDNPDNESILEDIVQTLTLFEDREMIKKRLENYKDLFTESQLKKLYRRHYTGWGRLSAKLINGIRDKESQKTILDYLISDGRANRNFMQLIHDDGLSFKPIIDKAQAGSHSDNLKEVVGELAGSPAIKKGILQSLKIVDELVKVMGYEPEQVVVEMARENQTTNQGRRNTRQRYKLLEEGVKNLASNILKEYPTDNQALQNERLFLYYLQNGRDMYTGEALDIDNLSQYDIDHIVPQAFIKDDSIDNRVLVSSAKNRGKSDNVPSIDIVKARKAFWKKLLDAKLMSQRKYDNLTKAERGGLTSDDKARFIQRQLVETRQITKHVARILDERFNNELDSKGRRIRKVKIVTLKSNLVSNFRKEFGFYKIREVNDYHHAHDAYLNAVVAKAILTKYPQLEPEFVYGDYPKYNSYKTRKATEKLFFYSNIMNFFKTKVTLADGTVVVKDDIEVNNDTGEIVWDKKKHFATVRKVLSYPQVNIVKKTEIQTGGFSKESILAHGNSDKLIPRKTKDIYLDPKKYGGFDSPIVAYSVLVVADIKKGKAQKLKTVTELLGITIMERFRFEKNPSAFLESKGYLNIRDDKLMILPKYSLFELENGRRRLLASAGELQKGNELALPTQYMKFLYLASRYNELKGKPEEIEQKQEFVVQHVSYFDDILQIINDFSNRVILADANLEKINKLYQDNKENISVDELANNIINLFTFTSLGAPAAFKFFDKIVDRKRYTSTKEVLNSTLIHQSITGLYETRIDLGKLGED

SEQ ID NO: 70 - protein, 1365 aa, Streptococcus agalactiae
MNKPYSIGLDIGTNSVGWSIITDDYKVPAKKMRVLGNTDKEYIKKNLIGALLFDGGNTAADRRLKRTARRRYTRRRNRILYLQEIFAEEMSKVDDSFFHRLEDSFLVEEDKRGSKYPIFATMQEEKDYHEKFPTIYHLRKELADKKEKADLRLVYLALAHIIKFRGHFLIEDDRFDVRNTDIQKQYQAFLEIFDTSFENNHLLSQNVDVEAILTDKISKSAKKDRILAQYPNQKSTGIFAEFLKLIVGNQADFKKHFNLEDKTPLQFAKDSYDEDLENLLGQIGDEFADLFSAAKKLYDSVLLSGILTVTDLSTKAPLSASMIQRYDEHREDLKQLKQFVKASLPEKYQEIFADSSKDGYAGYIEGKTNQEAFYKYLSKLLTKQEDSEYFLEKIKNEDFLRKQRTFDNGSIPHQVHLTELKAIIRRQSEYYPFLKENQDKIEKILTFRIPYYVGPLARGNSDFAWMTRKTDDSIRPWNFEDLVDKEKSAEAFIHRMTNNDLYLPEEKVLPKHSLIYEKFTVYNELTKVRYKNEQGETYFFDSNVKQEIFDGVFKEHRKVSKKQLLDFLAKEFEEFRIVDVTGLDKENKAFNASLGTYHDLKKILDKDFLDNPDNESILEDIVQTITLFEDREMIKKRLENYKDLFTESQLKKLYRRHYTGWGRLSAKLINGIRDRESQKTILDYLISDGRANRNFMQLINDDGLSFKSIISKAQSGSHSDNLKEVVGELAGSPAIKKGILQSLKIVDELVKVMGYEPEQIVVEMARENQTTNQGRRNSRQRYKLLEDGVKNLASDILKEYPTDNQALQNERLFLYYLQNGRDMYTGEALDIDNLSQYDIDHIVPQAFIKDDSIDNRVLVSSAKNRGKSDDVPSIDIVKARKAFWKKLLDAKLISQRKYDNLTKAERGGLTPDDKAGFIQRQLVETRQITKHVARILDERFNNKVDDNNKPIRKVKIVTLKSNLVSNFRKEFGFYKIREVNNYHHAHDAYLNAVVAKAILTKYPQLEPEFVYGDYPKYNSYKTRKATEKLFFYSNIMNFFKTKVTLADETVVVKDDIEVNNETGEIAWDKKKHFATVRKVLSYPQVNIVKKTEVQTGGFSKESILAHSNSDKLIPRKTKDIYLDPKKYGGFDSPIVAYSVLVLADIKKGKAQKLKTVKELIGITIMERERFEKNPSAFLESKGYLNIRTDKLIILPKYSLFELENGRRRLLASAGELQKGNELALPTQYMKFLYLASRYNESKGKPEEIEKKQEFVNQHVSYFDDILQLINDFSKRVILADANLEKINKLYSDNKDNTPVDELAKNIINLFTFTSLGAPAAFKFFDKSVDRKRYTSTKEVLDSTLIHQSITGLYETRIDLGKLGED

SEQ ID NO: 71 - protein, 1365 aa, Streptococcus agalactiae
MNKPYSIGLDIGTNSVGWSIITDDYKVPAKKMRVLGNTDKEYIKKNLIGALLFDGGNTAADRRLKRTARRRYTRRRNRILYLQEIFAEEMSKVDDSFFHRLEDSFLVEEDKRGSKYPIFATMQEEKYYHEKFPTIYHLRKELADKKEKADLRLIYLALAHIIKFRGHFLIEDDRFDVRNTDIQKQYQAFLEIFDTTFENNDLLSQNVDVEAILTDKISKSAKKDRILARYPNQKSTGIFAEFLKLIVGNQADFKKHFNLEDKTPLQFAKDSYDEDLENLLGQIGDEFADLFSAAKKLYDSVLLSGILTVTDLSTKAPLSASMIQRYDEHREDLKQLKQFVKASLPEKYQEIFADSSKDGYAGYIEGKTNQEAFYKYLSKLLTKQEGSEYLLEKIKNEDFLRKQRTFDNGSIPHQVHLTELRAIIRRQSEYYPFLKENLDRIEKILTFRIPYYVGPLAREKSDFAWMTRKTDDSIRPWNFEDLVDKEKSAEAFIHRMTNNDLYLPEEKVLPKHSLIYEKFTVYNELTKVRFLAEGFKDFQFLNRKQKETIFNSLFKEKRKVTEKDIISFLNKVDGYEGIAIKGIEKQFNASLSTYHDLKKILGKDFLDNTDNELILEDIVQTLTLFEDREMIRKRLDIYKDFFTESQLKKLYRRHYTGWGRLSAKLINGIRNKENQKTILDYLIDDGSANRNFMQLIKDAGLSFKPIIDKARTGSHSDNLKEVVGELAGSPAIKKGILQSLKIVDELVKVMGYEPEQIVVEMARENQTTAKGLSRLRQRLTTLRESLANLKSEKKPKYVKDQVENHHLSDDRLFLYYLQNGKDMYTDDELDIDNLSQYDIDLIIPQAFIKDDSIDNRVLVSSAKNRGKSDDVPSVEIVKDCKVFWKKLLDAKLMSQRKYDNLTKAERGGLTSDDKARFIQRQLVETRQITKHVARILDERFNNELDSKGRRIRKVKIVTLKSNLVSNFRKEFGFYKIREVNNYHHAHDAYLNAVVAKAILTKYPQLEPEFVYGDYPKYNSYKTRKATEKLFFYSNIMNFFKTKVTLADGTVVVKDDIEVNNDTGEIVWDKKKHFATVRKVLSYPQVNIVKKTEIQTGGFSKESILAHGNSDKLIPRKTKDIYLDPKKYGGFDSPIVAYSVLVVADIKKGKAQKLKTVTELLGITIMERSRFEKNPSAFLESKGYLNIRDDKLMILPKYSLFELENGRRRLLASADELQKGNELALPTQFMKFLYLASRYNELKGKPEEIEQKQEFVVQHVSYFDDILQIINDFSNRVILADANLEKINKLYQDNKENIPVDELANNIINLFTFTSLGAPAAFKFFDKIVDRKRYTSTKEVLNSTLIHQSITGLYETRIDLGKLGED

SEQ ID NO: 72 - protein, 1365 aa, Streptococcus agalactiae
MNKPYSIGLDIGTNSVGWSIITDDYKVPAKKMRVLGNTDKEYIKKNLIGALLFDGGNTASDRRLKRTARRRYTRRRNRILYLQEIFAEEMSKVDDSFFHRLEDSFLVEDDKRGSKYPIFATMQEEKDYHEKFPTIYHLRKELADKKEKADLRLFYLALAHIIKFRGHFLIEDDSFDVRNTDIQRQYQAFLEIFDTTFENNHLLSQNIDIEGILTDKISKSAKKDRILAQYPNQKSTGIFAEFLKLIVGNQADFKKHFNLEDKTPLQFAKDSYDEDLENLLGQIGDEFADLFSVAKKLYDSVLLSGILTVTDLSTKAPLSASMIQRYDEHREDLKQLKQFVKASLPEKYQEIFTDSSKDGYAGYIEGKTNQGAFYKYLSKLLTKQEGSEYFLEKIKNEDFLRKQRTFDNGSIPHQVHLTELKAIIRRQSEYYPFLKENLDRIEKILTFRIPYYVGPLAREKSDFAWMTRKTDDSIRPWNFEELVDKEASAEAFIHRMTNNDLYLPEEKVLPKHSLIYEKFTVYNELTKVRYKNEQGETYFFDSNIKQEIFDGVFKEHRKVSKKKLLDFLAKEYEEFRIVDVIGLDKENKAFNASLGTYHDLKKILDKDFLDNPDNESILEDIVQTLTLFEDREMIKKRLENYKDLFTESQLKKLYRRHYTGWGRLSAKLINGIRDKESQKTILDYLIDDGKSNRNFMQLIHDDGLSFKSIISKAQAGSHSDNLKEVVGELAGSPAIKKGILQSLKIVDELVKVMGYEPEQIVVEMARENQTTNQGRRNSRQRYKLLDDGVKNLASNILKEYPTDNQALQNERLFLYYLQNGRDMYTGKALDIDNLSQYDIDHIIPQAFIKDDSIDNRVLVSSAKNRGKSDDVPSLEIVKDCKVFWKKLLDAKLMSQRKYDNLTKAERGGLTSDDKARFIQRQLVETRQITKHVARILDERFNNELDSKGRRIRKVKIVTLKSNLVSNFRKEFGFYKIREVNNYHHAHDAYLNAVVAKAILTKYPQLEPEFVYGDYPKYNSYKTRKATEKLFFYSNIMNFFKTKVTLADGTVVVKDDIEVNNDTGEIVWDKKKHFATVRKVLSYPQVNIVKKTEIQTGGFSKESILAHGNSDKLIPRKTKDIYLDPKKYGGFDSPIVAYSVLVVADIKKGKAQKLKTVTELLGITIMERSRFEKNPSAFLESKGYLNIRDDKLMILPKYSLFELENGRRRLLASAGELQKGNELALPTQFMKFLYLASRYNELKGKPEEIEQKQEFVVQHVSYFDDILQIINDFSNRVILADANLEKINKLYQDNKENISVDELANNIINLFTFTSLGAPAAFKFFDKIVDRKRYTSTKEVLNSTLIHQSITGLYETRIDLGKLGED

SEQ ID NO: 73 - protein, 1365 aa, Streptococcus agalactiae
MNKPYSIGLDIGTNSVGWSIITDDYKVPAKKMRVLGNTDKEYIKKNLIGALLFDGGNTASDRRLKRTARRRYTRRRNRILYLQEIFAEEMSKVDDSFFHRLEDSFLVEDDKRGSKYPIFATMQEEKDYHEKFPTIYHLRKELADKKEKADLRLFYLALAHIIKFRGHFLIEDDSFDVRNTDIQRQYQAFLEIFDTTFENNHLLSQNIDVEGILTDKISKSAKKDRILAQYPNQKSTGIFAEFLKLIVGNQADFKKHFNLEDKTPLQFAKDSYDEDLENLLGQIGDEFADLFSVAKKLYDSVLLSGILTVTDLSTKAPLSASMIQRYDEHREDLKQLKQFVKASLPEKYQEIFTDSSKDGYAGYIEGKTNQGAFYKYLSKLLTKQEGSEYFLEKIKNEDFLRKQRTFDNGSIPHQVHLTELKAIIRRQSEYYPFLKENLDRIEKILTFRIPYYVGPLAREKSDFAWMTRKTDDSIRPWNFEELVDKEASAEAFIHRMTNNDLYLPEEKVLPKHSLIYEKFTVYNELTKVRYKNEQGETYFFDSNIKQEIFDGVFKEHRKVSKKKLLDFLAKEYEEFRIVDVIGLDKENKAFNASLGTYHDLKKILDKDFLDNPDNESILEDIVQTLTLFEDREMIKKRLENYKDLFTESQLKKLYRRHYTGWGRLSAKLINGIRDKESQKTILDYLIDDGKSNRNFMQLIHDDGLSFKSIISKAQAGSHSDNLKEVVGELAGSPAIKKGILQSLKIVDELVKVMGYEPEQIVVEMARENQTTNQGRRNSRQRYKLLDDGVKNLASNILKEYPTDNQALQNERLFLYYLQNGRDMYTGKALDIDNLSQYDIDHIIPQAFIKDDSIDNRVLVSSAKNRGKSDDVPSLEIVKDCKVFWKKLLDAKLMSQRKYDNLTKAERGGLTSDDKARFIQRQLVETRQITKHVARILDERFNNELDSKGRRIRKVKIVTLKSNLVSNFRKEFGFYKIREVNNYHHAHDAYLNAVVAKAILTKYPQLEPEFVYGDYPKYNSYKTRKATEKLFFYSNIMNFFKTKVTLADGTVVVKDDIEVNNDTGEIVWDKKKHFATVRKVLSYPQVNIVKKTEIQTGGFSKESILAHGNSDKLIPRKTKDIYLDPKKYGGFDSPIVAYSVLVVADIKKGKAQKLKTVTELLGITIMERSRFEKNPSAFLESKGYLNIRDDKLMILPKYSLFELENGRRRLLASAGELQKGNELALPTQFMKFLYLASRYNELKGKPEEIEQKQEFVVQHVSYFDDILQIINDFSNRVILADANLEKINKLYQDNKENISVDELANNIINLFTFTSLGAPAAFKFFDKIVDRKRYTSTKEVLNSTLIHQSITGLYETRIDLGKLGED

SEQ ID NO: 74 - protein, 1365 aa, Streptococcus agalactiae
MNKPYSIGLDIGTNSVGWSIITDDYKVPAKKMRVLGNTDKEYIKKNLIGALLFDGGNTAADRRLKRTARRRYTRRRNRILYLQEIFAEEMSKVDDSFFHRLEDSFLVEEDKRGSKYPIFATLQEEKDYHEKFPTIYHLRKELADKKEKADLRLIYIALAHIIKFRGHFLIEDDSFDVRNTDISKQYQDFLEIFNTTFENNDLLSQNVDVEAILTDKISKSAKKDRILAQYPNQKSTGIFAEFLKLIVGNQADFKKYFNLEDKTPLQFAKDSYDEDLENLLGQIGDEFADLFSAAKKLYDSVLLSGILTVIDLSTKAPLSASMIQRYDEHREDLKQLKQFVKASLPEKYQEIFADSSKDGYAGYIEGKTNQEAFYKYLSKLLTKQEDSENFLEKIKNEDFLRKQRTFDNGSIPHQVHLTELKAIIRRQSEYYPFLKENQDRIEKILTFRIPYYIGPLAREKSDFAWMTRKTDDSIRPWNFEDLVDKEKSAEAFIHRMTNNDFYLPEEKVLPKHSLIYEKFTVYNELTKVRYKNEQGETYFFDSNIKQEIFDGVFKEHRKVSKKKLLDFLAKEYEEFRIVDVIGLDKENKAFNASLGTYHDLEKILDKDFLDNPDNESILEDIVQTLTLFEDREMIKKRLENYKDLFTESQLKKLYRRHYTGWGRLSAKLINGIRDKESQKTILDYLIDDGRSNRNFMQLINDDGLSFKSIISKAQAGSHSDNLKEVVGELAGSPAIKKGILQSLKIVDELVKVMGYEPEQIVVEMARENQTTNQGRRNSRQRYKLLDDGVKNLASNILKEYPTDNQALQNERLFLYYLQNGRDMYTGEALDIDNLSQYDIDHIIPQAFIKDDSIDNRVLVSSAKNRGKSDDVPSLEIVKDCKVFWKKLLDAKLMSQRKYDNLTKAERGGLTSDDKARFIQRQLVETRQITKHVARILDERFNNELDSKGRRIRKVKIVTLKSNLVSNFRKEFGFYKIREVNNYHHAHDAYLNAVVAKAILTKYPQLEPEFVYGDYPKYNSYKTRKATEKLFFYSNIMNFFKTKVTLADGTVVVKDDIEVNNDTGEIVWDKKKHFATVRKVLSYPQNNIVKKTEIQTGGFSKESILAHGNSDKLIPRKTKDIYLDPKKYGGFDSPIVAYSVLVVADIKKGKAQKLKTVTELLGITIMERSRFEKNPSAFLESKGYLNIRADKLIILPKYSLFELENGRRRLLASAGELQKGNELALPTQFMKFLYLASRYNESKGKPEEIEKKQEFVNQHVSYFDDILQLINDFSKRVILADANLEKINKLYQDNKENISVDELANNIINLFTFTSLGAPAAFKFFDKIVDRKRYTSTKEVLNSTLIHQSITGLYETRIDLGKLGED

SEQ ID NO: 75 - protein, 1365 aa, Streptococcus agalactiae
MNKPYSIGLDIGTNSVGYSVVTDDYKVPAKKMRVLGNTDKEYIKKNLIGALLFDGGNTASDRRLKRTARRRYTRRRNRILYLQEIFAEEMSKVDDSFFHRLEDSFLVEDDKRGSKYPIFATMQEEKDYHEKFPTIYHLRKELADKKEKADLRLVYLALAHIIKFRGHFLIEDDSFDVRNTDIQRQYQAFLEIFDTTFENNHLLSQNIDVEGILTDKISKSAKKDRILAQYPNQKSTGIFAEFLKLIVGNQADFKKHFNLEDKTPLQFAKDSYDEDLENLLGQIGDEFADLFSVAKKLYDSVLLSGILTVTALSTKAPLSASMIQRYDEHREDLKQLKQFVKASLPEKYQEIFTDSSKDGYAGYIEGKTNQGAFYKYLSKLLTKQEGSEYFLEKIKNEDFLRKQRTFDNGSIPHQVHLTELKAIIRRQSEYYPFLKENLDRIEKILTFRIPYYVGPLAREKSDFAWMTRKTDDSIRPWNFEELVDKEASAEAFIHRMTNNDLYLPEEKVLPKHSLIYEKFTVYNELTKVRYKNEQGETYFFDSNIKQEIFDGVFKEHRKVSKKKLLDFLAKEYEEFRIVDVIGLDKENKAFNASLGTYHDLKKILDKDFLDNPDNESILEDIVQTLTLFEDREMIKKRLENYKDLFTESQLKKLYRRHYTGWGRLSAKLINGIRDKESQKTILDYLISDGRANRNFMQLIHDDGLSFKPIIDKAQAGSHSDNLKEVVGELAGSPAIKKGILQSLKIVDELVKVMGYEPEQVVVEMARENQTTNQGRRNTRQRYKLLEEGVKNLASNILKEYPTDNQALQNERLFLYYLQNGRDMYTGEALDIDNLSQYDIDHIVPQAFIKDDSIDNRVLVSSAKNRGKSDNVPSIDIVKARKAFWKKLLDAKLMSQRKYDNLTKAERGGLTSDDKARFIQRQLVETRQITKHVARILDERFNNELDSKGRRIRKVKIVTLKSNLVSNFRKEFGFYKIREVNDYHHAHDAYLNAVVAKAILTKYPQLEPEFVYGDYPKYNSYKTRKATEKLFFYSNIMNFFKTKVTLADGTVVVKDDIEVNNDTGEIVWDKKKHFATVRKVLSYPQVNIVKKTEIQTGGFSKESILAHGNSDKLIPRKTKDIYLDPKKYGGFDSPIVAYSVLVVADIKKGKAQKLKTVTELLGITIMERFRFEKNPSAFLESKGYLNIRDDKLMILPKYSLFELENGRRRLLASAGELQKGNELALPTQYMKFLYLASRYNELKGKPEEIEQKQEFVVQHVSYFDDILQIINDFSNRVILADANLEKINKLYQDNKENISVDELANNIINLFTFTSLGAPAAFKFFDKIVDRKRYTSTKEVLNSTLIHQSITGLYETRIDLGKLGED

SEQ ID NO: 76 - protein, 1365 aa, Streptococcus agalactiae
MNKPYSIGLDIGTNSVGWSIITDDYKVPAKKMRVLGNTDKEYIKKNLIGALLFDGGNTAADRRLKRTARRRYTRRRNRILYLQEIFAEEMSKVDDSFFHRLEDSFLVEEDKRGSKYPIFATLQEEKDYHEKFSTIYHLRKELADKKEKADLRLIYIALAHIIKFRGHFLIEDDSFDVRNTDISKQYQDFLEIFNTTFENNDLLSQNVDVEAILTDKISKSAKKDRILAQYPNQKSTGIFAEFLKLIVGNQADFKKYFNLEDKTPLQFAKDSYDEDLENLLGQIGDEFADLFSAAKKLYDSVLLSGILTVIDLSTKAPLSASMIQRYDEHREDLKQLKQFVKASLPEKYQEIFADSSKDGYAGYIEGKTNQEAFYKYLSKLLTKQEDSENFLEKIKNEDFLRKQRTFDNGSIPHQVHLTELKAIIRRQSEYYPFLKENQDRIEKILTFRIPYYIGPLAREKSDFAWMTRKTDDSIRPWNFEDLVDKEKSAEAFIHRMTNNDFYLPEEKVLPKHSLIYEKFTVYNELTKVRYKNEQGETYFFDSNIKQEIFDGVFKEHRKVSKKKLLDFLAKEYEEFRIVDVIGLDKENKAFNASLGTYHDLEKILDKDFLDNPDNESILEDIVQTLTLFEDREMIKKRLENYKDLFTESQLKKLYRRHYTGWGRLSAKLINGIRDKESQKTILDYLIDDGRSNRNFMQLINDDGLSFKSIISKAQAGSHSDNLKEVVGELAGSPAIKKGILQSLKIVDELVKVMGYEPEQIVVEMARENQTTNQGRRNSRQRYKLLDDGVKNLASNILKEYPTDNQALQNERLFLYYLQNGRDMYTGEALDIDNLSQYDIDHIIPQAFIKDDSIDNRVLVSSAKNRGKSDDVPSLEIVKDCKVFWKKLLDAKLMSQRKYDNLTKAERGGLTSDDKARFIQRQLVETRQITKHVARILDERFNNELDSKGRRIRKVKIVTLKSNLVSNFRKEFGFYKIREVNNYHHAHDAYLNAVVAKAILTKYPQLEPEFVYGDYPKYNSYKTRKATEKLFFYSNIMNFFKTKVTLADGTVVVKDDIEVNNDTGEIVWDKKKHFATVRKVLSYPQNNIVKKTEIQTGGFSKESILAHGNSDKLIPRKTKDIYLDPKKYGGFDSPIVAYSVLVAADIKKGKAQKLKTVTELLGITIMERSRFEKNPSAFLESKGYLNIRADKLIILPKYSLFELENGRRRLLASAGELQKGNELALPTQFMKFLYLASRYNESKGKPEEIEKKQEFVNQHVSYFDDILQLINDFSKRVILADANLEKINKLYQDNKENISVDELANNIINLFTFTSLGAPAAFKFFDKIVDRKRYTSTKEVLNSTLIHQSITGLYETRIDLGKLGED

SEQ ID NO: 77 - protein, 1365 aa, Streptococcus agalactiae
MNKPYSIGLDIGTNSVGWSIITDDYKVPAKKMRVLGNTDKEYIKKNLIGALLFDGGNTAADRRLKRTARRRYTRRRNRILYLQEIFAEEMSKVDDSFFHRLEDSFLVEEDKRGSKYPIFATLQEEKDYHEKFSTIYHLRKELADKKEKADLRLIYIALAHIIKFRGHFLIEDDSFDVRNTDISKQYQDFLEIFNTTFENNDLLSQNVDVEAILTDKISKSAKKDRILAQYPNQKSTGIFAEFLKLIVGNQADFKKYFNLEDKTPLQFAKDSYDEDLENLLGQIGDEFADLFSAAKKLYDSVLLSGILTVIDLSTKASLSDSMIQRYDEHREDLKQLKQFVKASLPEKYQEIFADSSKDGYAGYIEGKTNQEAFYKYLSKLLTKQEDSENFLEKIKNEDFLRKQRTFDNGSIPHQVHLTELKAIIRRQSEYYPFLKENQDRIEKILTFRIPYYIGPLAREKSDFAWMTRKTDDSIRPWNFEDLVDKEKSAEAFIHRMTNNDFYLPEEKVLPKHSLIYEKFTVYNELTKVRYKNEQGETYFFDSNIKQEIFDGVFKEHRKVSKKKLLDFLAKEYEEFRIVDVIGLDKENKAFNASLGTYHDLEKILDKDFLDNPDNESILEDIVQTLTLFEDREMIKKRLENYKDLFTESQLKKLYRRHYTGWGRLSAKLINGIRDKESQKTILDYLIDDGRSNRNFMQLINDDGLSFKSIISKAQAGSHSDNLKEVVGELAGSPAIKKGILQSLKIVDELVKVMGYEPEQIVVEMARENQTTNQGRRNSRQRYKLLDDGVKNLASNILKEYPTDNQALQNERLFLYYLQNGRDMYTGEALDIDNLSQYDIDHIIPQAFIKDDSIDNRVLVSSAKNRGKSDDVPSLEIVKDCKVFWKKLLDAKLMSQRKYDNLTKAERGGLTSDDKARFIQRQLVETRQITKHVARILDERFNNELDSKGRRIRKVKIVTLKSNLVSNFRKEFGFYKIREVNNYHHAHDAYLNAVVAKAILTKYPQLEPEFVYGDYPKYNSYKTRKATEKLFFYSNIMNFFKTKVTLADGTVVVKDDIEVNNDTGEIVWDKKKHFATVRKVLSYPQNNIVKKTEIQTGGFSKESILAHGNSDKLIPRKTKDIYLDPKKYGGFDSPIVAYSVLVVADIKKGKAQKLKTVTELLGITIMERSRFEKNPSAFLESKGYLNIRADKLIILPKYSLFELENGRRRLLASAGELQKGNELALPTQFMKFLYLASRYNESKGKPEEIEKKQEFVNQHVSYFDDILQLINDFSKRVILADANLEKINKLYQDNKENISVDELANNIINLFTFTSLGAPAAFKFFDKIVDRKRYTSTKEVLNSTLIHQSITGLYETRIDLGKLGED

SEQ ID NO: 78 - protein, 1365 aa, Streptococcus agalactiae
MNKPYSIGLDIGTNSVGWSIITDDYKVPAKKMRVLGNTDKEYIKKNLIGALLFDGGNTAADRRLKRTARRRYTRRRNRILYLQEIFAEEMSKVDDSFFHRLEDSFLVEEDKRGSKYPIFATLQEEKDYHEKFSTIYHLRKELADKKEKADLRLIYIALAHIIKFRGHFLIEDDSFDVRNTDISKQYQDFLEIFNTTFENNDLLSQNVDVEAILTDKISKSAKKDRILAQYPNQKSTGIFAEFLKLIVGNQADFKKYFNLEDKTPLQFAKDSYDEDLENLLGQIGDEFADLFSAAKKLYDSVLLSGILTVIDLSTKAPLSASMIQRYDEHREDLKQLKQFVKASLPEKYQEIFADSSKDGYAGYIEGKTNQEAFYKYLSKLLTKQEDSENFLEKIKNEDFLRKQRTFDNGSIPHQVHLTELKAIIRRQSEYYPFLKENQDRIEKILTFRIPYYIGPLAREKSDFAWMTRKTDDSIRPWNFEDLVDKEKSAEAFIHRMTNNDFYLPEEKVLPKHSLIYEKFTVYNELTKVRYKNEQGETYFFDSNIKQEIFDGVFKEHRKVSKKKLLDFLAKEYEEFRIVDVIGLDKENKAFNASLGTYHDLEKILDKDFLDNPDNESILEDIVQTLTLFEDREMIKKRLENYKDLFTESQLKKLYRRHYTGWGRLSAKLINGIRDKESQKTILDYLIDDGRSNRNFMQLINDDGLSFKSIISKAQAGSHSDNLKEVVGELAGSPAIKKGILQSLKIVDELVKVMGYEPEQIVVEMARENQTTNQGRRNSRQRYKLLDDGVKNLASNILKEYPTDNQALQNERLFLYYLQNGRDMYTGEALDIDNLSQYDIDHIIPQAFIKDDSIDNRVLVSSAKNRGKSDDVPSLEIVKDCKVFWKKLLDAKLMSQRKYDNLTKAERGGLTSDDKARFIQRQLVEIRQITKHVARILDERFNNELDSKGRRIRKVKIVTLKSNLVSNFRKEFGFYKIREVNNYHHAHDAYLNAVVAKAILTKYPQLEPEFVYGDYPKYNSYKTRKATEKLFFYSNIMNFFKTKVTLADGTVVVKDDIEVNNDTGEIVWDKKKHFATVRKVLSYPQNNIVKKTEIQTGGFSKESILAHGNSDKLIPRKTKDIYLDPKKYGGFDSPIVAYSVLVVADIKKGKAQKLKTVTELLGITIMERSRFEKNPSAFLESKGYLNIRADKLIILPKYSLFELENGRRRLLASAGELQKGNELALPTQFMKFLYLASRYNESKGKPEEIEKKQEFVNQHVSYFDDILQLINDFSKRVILADANLEKINKLYQDNKENISVDELANNIINLFTFTSLGAPAAFKFFDKIVDRKRYTSTKEVLNSTLIHQSITGLYETRIDLGKLGED

SEQ ID NO: 79 - protein, 1365 aa, Streptococcus agalactiae
MNKPYSIGLDIGTNSVGWSIITDDYKVPAKKMRVLGNTDKEYIKKNLIGALLFDGGNTAADRRLKRTARRRYTRRRNRILYLQEIFAEEMSKVDDSFFHRLEDSFLVEEDKRGSKYPIFATLQEEKDYHEKFSTIYHLRKELADKKEKADLRLIYIALAHIIKFRGHFLIEDDSFDVRNTDISKQYQDFLEIFNTTFENNDLLSQNVDVEAILTDKISKSAKKDRILAQYPNQKSTGIFAEFLKLIVGNQADFKKYFNLEDKTPLQFAKDSYDEDLENLLGQIGDEFADLFSAAKKLYDSVLLSGILTVIDLSTKAPLSASMIQRYDEHREDLKQLKQFVKASLPEKYQEIFADSSKDGYAGYIEGKTNQEAFYKYLSKLLTKQEDSENFLEKIKNEDFLRKQRTFDNGSIPHQVHLTELKAIIRRQSEYYPFLKENQDRIEKILTFRIPYYIGPLAREKSDFAWMTRKTDDSIRPWNFEDLVDKEKSAEAFIHRMTNNDFYLPEEKVLPKHSLIYEKFTVYNELTKVRYKNEQGETYFFDSNIKQEIFDGVFKEHRKVSKKKLLDFLAKEYEEFRIVDVIGLDKENKAFNASLGTYHDLEKILDKDFLDNPDNESILEDIVQTLTLFEDREMIKKRLENYKDLFTESQLKKLYRRHYTGWGRLSAKLINGIRDKESQKTILDYLIDDGRSNRNFMQLINDDGLSFKSIISKAQAGSHSDNLKEVVGELAGSPAIKKGILQSLKIVDELVKVMGYEPEQIVVEMARENQTTNQGRRNSRQRYKLLDDGVKNLASNILKEYPTDNQALQNERLFLYYLQNGRDMYTGEALDIDNLSQYDIDHIIPQAFIKDDSIDNRVLVSSAKNRGKSDDVPSLEIVKDCKVFWKKLLDAKLMSQRKYDNLTKAERGGLTSDDKARFIQRQLVETRQITKHVARILDERFNNELDSKGRRIRKVKIVTVKSNLVSNFRKEFGFYKIREVNNYHHAHDAYLNAVVAKAILTKYPQLEPEFVYGDYPKYNSYKTRKATEKLFFYSNIMNFFKTKVTLADGTVVVKDDIEVNNDTGEIVWDKKKHFATVRKVLSYPQNNIVKKTEIQTGGFSKESILAHGNSDKLIPRKTKDIYLDPKKYGGFDSPIVAYSVLVVADIKKGKAQKLKTVTELLGITIMERSRFEKNPSAFLESKGYLNIRADKLIILPKYSLFELENGRRRLLASAGELQKGNELALPTQFMKFLYLASRYNESKGKPEEIEKKQEFVNQHVSYFDDILQLINDFSKRVILADANLEKINKLYQDNKENISVDELANNIINLFTFTSLGAPAAFKFFDKIVDRKRYTSTKEVLNSTLIHQSITGLYETRIDLGKLGED

SEQ ID NO: 80 - protein, 1365 aa, Streptococcus agalactiae
MNKPYSIGLDIGTNSVGWSIITDDYKVPAKKMRVLGNTDKEYIKKNLIGALLFDGGNTAADRRLKRTARRRYTRRRNRILYLQEIFAEEMSKVDDSFFHRLEDSFLVEEDKRGSKYPIFATLQEEKDYHEKFSTIYHLRKELADKKEKADLRLIYIALAHIIKFRGHFLIEDDSFDVRNTDISKQYQDFLEIFNTTFENNDLLSQNVDVEAILTDKISKSAKKDRILAQYPNQKSTGIFAEFLKLIVGNQADFKKYFNLEDKTPLQFAKDSYDEDLENLLGQIGDEFADLFSAAKKLYDSVLLSGILTVIDLSTKAPLSASMIQRYDEHREDLKQLKQFVKASLPEKYQEIFADSSKDGYAGYIEGKTNQEAFYKYLSKLLTKQEDSENFLEKIKNEDFLRKQRTFDNGSIPHQVHLTELKAIIRRQSEYYPFLKENQDRIEKILTFRIPYYIGPLAREKSDFAWMTRKTDDSIRPWNFEDLVDKEKSAEAFIHRMTNNDFYLPEEKVLPKHSLIYEKFTVYNELTKVRYKNEQGETYFFDSNIKQEIFDGVFKEHRKVSKKKLLDFLAKEYEEFRIVDVIGLDKENKAFNASLGTYHDLEKILDKDFLDNPDNESILEDIVQTLTLFEDREMIKKRLENYKDLFTESQLKKLYRRHYTGWGRLSAKLINGIRDKESQKTILDYLIDDGRSNRNFMQLINDDGLSFKSIISKAQAGSHSDNLKEVVGELAGSPAIKKGILQSLKIVDELVKVMGYEPEQIVVEMARENQTTNQGRRNSRQRYKLLDDGVKNLASNILKEYPTDNQALQNERLFLYYLQNGRDMYTGEALDIDNLSQYDIDHIIPQAFIKDDSIDNRVLVSSAKNRGKSDDVPSLEIVKDCKVFWKKLLDAKLMSQRKYDNLTKAERGGLTSDDKARFIQRQLVETRQITKHVARILDELFNNELDSKGRRIRKVKIVTLKSNLVSNFRKEFGFYKIREVNNYHHAHDAYLNAVVAKAILTKYPQLEPEFVYGDYPKYNSYKTRKATEKLFFYSNIMNFFKTKVTLADGTVVVKDDIEVNNDTGEIVWDKKKHFATVRKVLSYPQNNIVKKTEIQTGGFSKESILAHGNSDKLIPRKTKDIYLDPKKYGGFDSPIVAYSVLVVADIKKGKAQKLKTVTELLGITIMERSRFEKNPSAFLESKGYLNIRADKLIILPKYSLFELENGRRRLLASAGELQKGNELALPTQFMKFLYLASRYNESKGKPEEIEKKQEFVNQHVSYFDDILQLINDFSKRVILADANLEKINKLYQDNKENISVDELANNIINLFTFTSLGAPAAFKFFDKIVDRKRYTSTKEVLNSTLIHQSITGLYETRIDLGKLGGD

SEQ ID NO: 81 - protein, 1365 aa, Streptococcus agalactiae; identical to SEQ ID NO: 50

SEQ ID NO: 82 - protein, 1365 aa, Streptococcus agalactiae
MNKPYSIGLDIGTNSVGYSVVTDDYKVPAKKMRVLGNTDKEYIKKNLIGALLFDGGNTASDRRLKRTARRRYTRRRNRILYLQEIFAEEMSKVDDSFFHRLEDSFLVEDDKRGSKYPIFATMQEEKDYHEKFPTIYHLRKELADKKEKANLRLVYLALAHIIKFRGHFLIEDDSFDVRNTDIQRQYQAFLEIFDTTFENNHLLSQNIDVEGILTDKISKSAKKDRILAQYPNQKSTGIFAEFLKLIVGNQADFKKHFNLEDKTPLQFAKDSYDEDLENLLGQIGDEFADLFSVAKKLYDSVLLSGILTVTDLSTKAPLSASMIQRYDEHREDLKQLKQFVKASLPEKYQEIFTDSSKDGYAGYIEGKTNQGAFYKYLSKLLTKQEGSEYFLEKIKNEDFLRKQRTFDNGSIPHQVHLTELKAIIRRQSEYYPFLKENLDRIEKILTFRIPYYVGPLAREKSDFAWMTRKTDDSIRPWNFEELVDKEASAEAFIHRMTNNDLYLPEEKVLPKHSLIYEKFTVYNELTKVRYKNEQGETYFFDSNIKQEIFDGVFKEHRKVSKKKLLDFLAKEYEEFRIVDVIGLDKENKAFNASLGTYHDLKKILDKDFLDNPDNESILEDIVQTLTLFEDREMIKKRLENYKDLFTESQLKKLYRRHYTGWGRLSAKLINGIRDKESQKTILDYLISDGRANRNFMQLIHDDGLSFKPIIDKAQAGSHSDNLKEVVGELAGSPAIKKGILQSLKIVDELVKVMGYEPEQVVVEMARENQTTNKGRRNTRQRYKLLEEGVKNLASNILKEYPTDNQALQNERLFLYYLQNGRDMYTGEALDIDNLSQYDIDHIVPQAFIKDDSIDNRVLVSSAKNRGKSDNVPSIDIVKARKAFWKKLLDAKLMSQRKYDNLTKAERGGLTSDDKARFIQRQLVETRQITKHVARILDERFNNELDSKGRRIRKVKIVTLKSNLVSNFRKEFGFYKIREVNDYHHAHDAYLNAVVAKAILTKYPQLEPEFVYGDYPKYNSYKTRKATEKLFFYSNIMNFFKTKVTLADGTVVVKDDIEVNNDTGEIVWDKKKHFATVRKVLSYPQVNIVKKTEIQTGGFSKESILAHGNSDKLIPRKTKDIYLDPKKYGGFDSPIVAYSVLVVADIKKGKAQKLKTVTELLGITIMERFRFEKNPSAFLESKGYLNIRDDKLMILPKYSLFELENGRRRLLASAGELQKGNELALPTQYMKFLYLASRYNELKGKPEEIEQKQEFVVQHVSYFDDILQIINDFSNRVILADANLEKINKLYQDNKENISVDELANNIINLFTFTSLGAPAAFKFFDKIVDRKRYTSTKEVLNSTLIHQSITGLYETRIDLGKLGED

SEQ ID NO: 83 - protein, 1365 aa, Streptococcus agalactiae
MNKPYSIGLDIGTNSVGWSIITDDYKVPAKKMRVLGNTDKEYIKKNLIGALLFDGRNTAADRRLKRTARRRYTRRRNRILYLQEIFAEEMSKVDDSFFHRLEDSFLVEEDKRGSKYPIFATLQEEKDYHEKFSTIYHLRKELADKKEKADLRLIYIALAHIIKFRGHFLIEDDSFDVRNTDISKQYQDFLEIFNTTFENNDLLSQNVDVEAILTDKISKSAKKDRILAQYPNQKSTGIFAEFLKLIVGNQADFKKYFNLEDKTPLQFAKDSYDEDLENLLGQIGDEFADLFSAAKKLYDSVLLSGILTVIDLSTKAPLSASMIQRYDEHREDLKQLKQFVKASLPEKYQEIFADSSKDGYAGYIEGKTNQEAFYKYLSKLLTKQEDSENFLEKIKNEDFLRKQRTFDNGSIPHQVHLTELKAIIRRQSEYYPFLKENQDRIEKILTFRIPYYIGPLAREKSDFAWMTRKTDDSIRPWNFEDLVDKEKSAEAFIHRMTNNDFYLPEEKVLPKHSLIYEKFTVYNELTKVRYKNEQGETYFFDSNIKQEIFDGVFKEHRKVSKKKLLDFLAKEYEEFRIVDVIGLDKENKAFNASLGTYHDLEKILDKDFLDNPDNESILEDIVQTLTLFEDREMIKKRLENYKDLFTESQLKKLYRRHYTGWGRLSAKLINGIRDKESQKTILDYLIDDGRSNRNFMQLINDDGLSFKSIISKAQAGSHSDNLKEVVGELAGSPAIKKGILQSLKIVDELVKVMGYEPEQIVVEMARENQTTNQGRRNSRQRYKLLDDGVKNLASNILKEYPTDNQALQNERLFLYYLQNGRDMYTGEALDIDNLSQYDIDHIIPQAFIKDDSIDNRVLVSSAKNRGKSDDVPSLEIVKDCKVFWKKLLDAKLMSQRKYDNLTKAERGGLTSDDKARFIQRQLVETRQITKHVARILDERFNNELDSKGRRIRKVKIVTLKSNLVSNFRKEFGFYKIREVNNYHHAHDAYLNAVVAKAILTKYPQLEPEFVYGDYPKYNSYKTRKATEKLFFYSNIMNFFKTKVTLADGTVVVKDDIEVNNDTGEIVWDKKKHFATVRKVLSYPQNNIVKKTEIQTGGFSKESILAHGNSDKLIPRKTKDIYLDPKKYGGFDSPIVAYSVLVVADIKKGKAQKLKTVTELLGITIMERSRFEKNPSAFLESKGYLNIRADKLIILPKYSLFELENGRRRLLASAGELQKGNELALPTQFMKFLYLASRYNESKGKPEEIEKKQEFVNQHVSYFDDILQLINDFSKRVILADANLEKINKLYQDNKENISVDELANNIINLFTFTSLGAPAAFKFFDKIVDRKRYTSTKEVLNSTLIHQSITGLYETRIDLGKLGED

SEQ ID NO: 84 - protein, 1365 aa, Streptococcus agalactiae
MNKPYSIGLDIGTNSVGWSIITDDYKVPAKKMRVLGNTDKEYIKKNLIGALLFDGGNTAADRRLKRTARRRYTRRRNRILYLQEIFAEEMSKVDDSFFHRLEDSFLVEEDKRGSKYPIFATMQEEKYYHEKFPTIYHLRKELADKKEKADLRLIYLALAHIIKFRGHFLIEDDSFDVRNTDIQKQYQAFLEIFDTTFENNDLLSQNVDVEAILTDKISKSAKKDRILARYPNQKSTGIFAEFLKLIVGNQADFKKHFNLEDKTPLQFAKDSYDEDLENLLGQIGDEFADLFSAAKKLYDSVLLSGILTVTDLSTKAPLSASMIQRYDEHREDLKQLKQFVKASLPEKYQEIFADSSKDGYAGYIEGKTNQEAFYKYLSKLLTKQEGSEYLLEKIKNEDFLRKQRTFDNGSIPHQVHLTELRAIIRRQSEYYPFLKENLDRIEKILTFRIPYYVGPLAREKSDFAWMTRKTDDSIRPWNFEDLVDKEKSAEAFIHRMTNNDLYLPEEKVLPKHSLIYEKFTVYNELTKVRFLAEGFKDFQFLNRKQKETIFNSLFKEKRKVTEKDIISFLNKVDGYEGIAIKGIEKQFNASLSTYHDLKKILGKDFLDNTDNELILEDIVQTLTLFEDREMIRKRLDIYKDFFTESQLKKLYRRHYTGWGRLSAKLINGIRNKENQKTILDYLIDDGSANRNFMQLIKDAGLSFKPIIDKARTGSHSDNLKEVVGELAGSPAIKKGILQSLKIVDELVKVMGYEPEQIVVEMARENQTTAKGLSRSRQRLTTLRESLANLKSEKKPKYVKDQVENHHLSDDRLFLYYLQNGKDMYTDDELDIDNLSQYDIDHIIPQAFIKDDSIDNRVLVSSAKNRGKSDDVPSVEIVKDCKVFWKKLLDAKLMSQRKYDNLTKAERGGLTSDDKARFIQRQLVETRQITKHVARILDERFNNELDSKGRRIRKVKIVTLKSNLVSNFRKEFGFYKIREVNNYHHAHDAYLNAVVAKAILTKYPQLEPEFVYGDYPKYNSYKTRKATEKLFFYSNIMNFFKTKVTLADGTVVVKDDIEVNNDTGEIVWDKKKHFATVRKVLSYPQVNIVKKTEIQTGGFSKESILAHGNSDKLIPRKTKDIYLDPKKYGGFDSPIVAYSVLVVADIKKGKAQKLKTVTELLGITIMERSRFEKNPSAFLESKGYLNIRDDKLMILPKYSLFELENGRRRLLASAGELQKGNELALPTQFMKFLYLASRYNELKGKPEEIEQKQEFVVQHVSYFDDILQIINDFSNRVILADANLEKINKLYQDNKENIPVDELANNIINLFTFTSLGAPAAFKFFDKIVDRKRYTSTKEVLNSTLIHKSITGLYETRIDLGKLGED

SEQ ID NO: 85 - protein, 1365 aa, Streptococcus agalactiae
MNKPYSIGLDIGTNSVGWSIITDDYKVPAKKMRVLGNTDKEYIKKNLIGALLFDGGNTAADRRLKRTARRRYTRRRNRILYLQEIFAEEMSKVDDSFFHRLEDSFLVEEDKRGSKYPIFATLQEEKDYHEKFSTIYHLRKELADKKEKADLRLIYIALAHIIKFRGHFLIEDDSFDVRNTDISKQYQDFLEIFNTTFENNDLLSQNVDVEAILTDKISKSAKKDRILAQYPNQKSTGIFAEFLKLIVGNQADFKKYFNLEDKTPLQFAKDSYDEDLENLLGQIGDEFADLFSAAKKLYDSVLLSGILTVIDLSTKAPLSASMIQRYDEHREDLKQLKQFVKASLPEKYQEIFADSSKDGYAGYIEGKTNQEAFYKYLSKLLTKQEDSENFLEKIKNEDFLRKQRTFDNGSIPHQVHLTELKAIIRRQSEYYPFLKENQDRIEKILTFRIPYYIGPLAREKSDFAWMTRKTDDSIRPWNFEDLVDKEKSAEAFIHRMTNNDFYLPEEKVLPKHSLIYEKFTVYNELTKVRYKNEQGETYFFDSNIKQEIFDGVFKEHRKVSKKKLLDFLAKEYEEFRIVDVIGLDKENKAFNASLGTYHDLEKILDKDFLDNPDNESILEDIVQTLTLFEDREMIKKRLENYKDLFTESQLKKLYRRHYTGWGRLSAKLINGIRDKESQKTILDYLIDDGRSNRNFMQLINDDGLSFKSIISKAQAGSHSDNLKEVVGELAGSPAIKKGILQSLKIVDELVKVMGYEPEQIVVEMARENQTTNQGRRNSRQRYKLLDDGVKNLASNILKEYPTDNQALQNERLFLYYLQNGRDMYTGEALDIDNLSQYDIDHIIPQAFIKDDSIDNRVLVSSAKNRGKSDDVPSLEIVKDCKVFWKKLLDAKLMSQRKYDNLTKAERGGLTSDDKARFIQRQLVETRQITKHVARILDERFNNELDSKGRRIRKVKIVTLKSNLVSNFRKEFGFYKIREVNNYHHAHDAYLNAVVAKAILTKYPQLEPEFVYGDYPKYNSYKTRKATEKLFFYSNIMNFFKTKVTLADGTVVIKDDIEVNNDTGEIVWDKKKHFATVRKVLSYPQNNIVKKTEIQTGGFSKESILAHGNSDKLIPRKTKDIYLDPKKYGGFDSPIVAYSVLVVADIKKGKAQKLKTVTELLGITIMERSRFEKNPSAFLESKGYLNIRADKLIILPKYSLFELENGRRRLLASAGELQKGNELALPTQFMKFLYLASRYNESKGKPEEIEKKQEFVNQHVSYFDDILQLINDFSKRVILADANLEKINKLYQDNKENISVDELANNIINLFTFTSLGAPAAFKFFDKIVDRKRYTSTKEVLNSTLIHQSITGLYETRIDLGKLGED

SEQ ID NO: 86 - protein, 1365 aa, Streptococcus agalactiae
MNKPYSIGLDIGTNSVGWSIITDDYKVPAKKMRVLGNTDKEYIKKNLIGALLFDGGNTAADRRLKRTARRRYTRRRNRILYLQEIFAEEMSKVDDSFFHRLEDSFLVEEDKRGSKYPIFATLQEEKDYHEKFSTIYHLRKELADKKEKADLRLIYIALAHIIKFRGHFLIEDDSFDVRNTDISKQYQDFLEIFNTTFENNDLLSQNVDVEAILTDKISKSAKKDRILAQYPNQKSTGIFAEFLKLIVGNQADFKKYFNLEDKTPLQFAKDSYDEDLENLLGQIGDEFADLFSAAKKLYDSVLLSGILTVIDLSTKAPLSASMIQRYDEHREDLKQLKQFVKASLPEKYQEIFADSSKDGYAGYIEGKTNQEAFYKYLSKLLTKQEDSENFLEKIKNEDFLRKQRTFDNGSIPHQVHLTELKAIIRRQSEYYPFLKENQDRIEKILTFRIPYYIGPLAREKSDFAWMTRKTDDSIRPWNFEDLVDKEKSAEAFIHRMTNNDFYLPEEKVLPKHSLIYEKFTVYNELTKVRYKNEQGETYFFDSNIKQEIFDGVFKEHRKVSKKKLLDFLAKEYEEFRIVDVIGLDKENKAFNASLGTYHDLEKILDKDFLDNPDNESILEDIVQTLTLFEDREMIKKRLENYKDLFTESQLKKLYRRHYTGWGRLSAKLINGIRDKESQKTILDYLIDDGRSNRNFMQLINDDGLSFKSIISKAQAGSHSDNLKEVVGELAGSPAIKKGILQSLKIVDELVKVMGYEPEQIVVEMARENQTTNQGRRNSRQRYKLLDDGVKNLASNILKEYPTDNQALQNERLFLYYLQNGRDMYTGEALDIDNLSQYDIDHIIPQAFIKDDSIDNRVLVSSAKNRGKSDDVPSLEIVKDCKVFWKKLLDAKLMSQRKYDNLTKAERGGLTSDDKARFIQRQLVETRQITKHVASILDERFNNELDSKGRRIRKVKIVTLKSNLVSNFRKEFGFYKIREVNNYHHAHDAYLNAVVAKAILTKYPQLEPEFVYGDYPKYNSYKTRKATEKLFFYSNIMNFFKTKVTLADGTVVVKDDIEVNNDTGEIVWDKKKHFATVRKVLSYPQNNIVKKTEIQTGGFSKESILAHGNSDKLIPRKTKDIYLDPKKYGGFDSPIVAYSVLVVADIKKGKAQKLKTVTELLGITIMERSRFEKNPSAFLESKGYLNIRADKLIILPKYSLFELENGRRRLLASAGELQKGNELALPTQFMKFLYLASRYNESKGKPEEIEKKQEFVNQHVSYFDDILQLINDFSKRVILADANLEKINKLYQDNKENISVDELANNIINLFTFTSLGAPAAFKFFDKIVDRKRYTSTKEVLNSTLIHQSITGLYETRIDLGKLGED

SEQ ID NO: 87 - protein, 1365 aa, Streptococcus agalactiae
MNKPYSIGLDIGTNSVGYSVVTDDYKVPAKKMRVLGNTDKEYIKKNLIGALLFDGGNTASDRRLKRTARRRYTRRRNRILYLQEIFAEEMSKVDDSFFHRLEDSFLVEDDKRGSKYPIFATMQEEKDYHEKFPTIYHLRKELADKKEKANLRLVYLALAHIIKFRGHFLIEDDSFDVRNTDIQRQYQAFLEIFDTTFENNHLLSQNIDVEGILTDKISKSAKKDRILAQYPNQKSTGIFAEFLKLIVGNQADFKKHFNLEDKTPLQFAKDSYDEDLENLLGQIGDEFADLFSVAKKLYDSVLLSGILTVTDLSTKAPLSASMIQRYDEHREDLKQLKQFVKASLPEKYQEIFTDSSKDGYAGYIESKTNQGAFYKYLSKLLTKQEGSEYFLEKIKNEDFLRKQRTFDNGSIPHQVHLTELKAIIRRQSEYYPFLKENLDRIEKILTFRIPYYVGPLAREKSDFAWMTRKTDDSIRPWNFEELVDKEASAEAFIHRMTNNDLYLPEEKVLPKHSLIYEKFTVYNELTKVRYKNEQGETYFFDSNIKQEIFDGVFKEHRKVSKKKLLDFLAKEYEEFRIVDVIGLDKENKAFNASLGTYHDLKKILDKDFLDNPDNESILEDIVQTLTLFEDREMIKKRLENYKDLFTESQLKKLYRRHYTGWGRLSAKLINGIRDKESQKTILDYLISDGRANRNFMQLIHDDGLSFKPIIDKAQAGSHSDNLKEVVGELAGSPAIKKGILQSLKIVDELVKVMGYEPEQVVVEMARENQTTNQGRRNTRQRYKLLEEGVKNLASNILKEYPTDNQALQNERLFLYYLQNGRDMYTGEALDIDNLSQYDIDHIVPQAFIKDDSIDNRVLVSSAKNRGKSDNVPSIDIVKARKAFWKKLLDAKLMSQRKYDNLTKAERGGLTSDDKARFIQRQLVETRQITKHVARILDERFNNELDSKGRRIRKVKIVTLKSNLVSNFRKEFGFYKIREVNDYHHAHDAYLNAVVAKAILTKYPQLEPEFVYGDYPKYNSYKTRKATEKLFFYSNIMNFFKTKVTLADGTVVVKDDIEVNNDTGEIVWDKKKHFATVRKVLSYPQVNIVKKTEIQTGGFSKESILAHGNSDKLIPRKTKDIYLDPKKYGGFDSPIVAYSVLVVADIKKGKAQKLKTVTELLGITIMERFRFEKNPSAFLESKGYLNIRDDKLMILPKYSLFELENGRRRLLASAGELQKGNELALPTQYMKFLYLASRYNELKGKPEEIEQKQEFVVQHVSYFDDILQIINDFSNRVILADANLEKINKLYQDNKENISVDELANNIINLFTFTSLGAPAAFKFFDKIVDRKRYTSTKEVLNSTLIHQSITGLYETRIDLGKLGED

SEQ ID NO: 88 - protein, 1365 aa, Streptococcus agalactiae
MNKPYSIGLDIGTNSVGWSIITDDYKVPAKKMRVLGNTDKEYIKKNLIGALLFDGGNTAADRRLKRTARRRYTRRRNRILYLQEIFAEEMSKVDDSFFHRLEDSFLVEEDKRGSKYPIFATLQEEKDYHEKFSTIYHLRKELADKKEKADLRLIYIALAHIIKFRGHFLIEDDSFDVRNTDISKQYQDFLEIFNTTFENNDLLSQNVDVEAILTDKISKSAKKDRILAQYPNQKSTGIFAEFLKLIVGNQADFKKYFNLEDKTPLQFAKDSYDEDLENLLGQIGDEFADLFSAAKKLYDSVLLSGILTVIDLSTKAPLSASMIQRYDEHREDLKQLKQFVKASLPEKYQEIFADSSKDGYAGYIEGKTNQEAFYKYLSKLLTKQEDSENFLEKIKNEDFLRKQRTFDNGSIPHQVHLTELKAIIRRQSEYYPFLKENQDRIEKILTFRIPYYIGPLAREKSDFAWMTRKTDDSIRPWNFEDLVDKEKSAEAFIHRMTNNDFYLPEEKVLPKHSLIYEKFTVYNELTKVRYKNEQGETYFFDSNIKQEIFDGVFKEHRKVSKKKLLDFLAKEYEEFRIVDVIGLDKENKAFNASLGTYHDLEKILDKDFLDNPDNESILEDIVQTLTLFEDREMIKKRLENYKDLFTESQLKKLYRRHYTGWGRLSAKLINGIRDKESQKTILDYLIDDGRSNRNFMQLINDDGLSFKSIISKAQAGSHSDNLKEVVGELAGSPAIKKGILQSLKIVDELVKVMGYEPEQIVVEMARENQTTNQGRRNSRQRYKLLDDGVKNLASNILKEYPTDNQALQNERLFLYYLQNGRDMYTGEALDIDNLSQYDIDHIIPQAFIKDDSIDNRVLVSSAKNRGKSDDVPSLEIVKDCKVFWKKLLDAKLMSQRKYDNLTKAERGGLTSDDKARFIQRQLVETRQITKHVARILDERFNNELDSKGRRIRKVKIVTLKSNLVSNFRKEFGFYKIREVNNYHHAHDAYLNAVVAKAILTKYPQLEPEFVYGDYPKYNSYKTRKATEKLFFYSNIMNFFKTKVTLADGTVVVKDDIEVNNDTGEIVWDKKKHFATVRKVLSYPQNNIVKKTEIQTGGFSKESILAHGNSDKLIPRKTKDIYLDPKKYGGFDSPIVAYSVLVVADIKKGKAQKLKTVTELLGITIMERSRFEKNLSAFLESKGYLNIRADKLIILPKYSLFELENGRRRLLASAGELQKGNELALPTQFMKFLYLASRYNESKGKPEEIEKKQEFVNQHVSYFDDILQLINDFSKRVILADANLEKINKLYQDNKENISVDELANNIINLFTFTSLGAPAAFKFFDKIIDRKRYTSTKEVLNSTLIHQSITGLYETRIDLGKLGED

SEQ ID NO: 89 - protein, 1365 aa, Streptococcus agalactiae
MNKPYSIGLDIGTNSVGWSIITDDYKVPAKKMRVLGNTDKEYIKKNLIGALLFDGGNTAADRRLKRTARRRYTRRRNRILYLQEIFAEEMSKVDDSFFHRLEDSFLVEEDKRGSKYPIFATLQEEKDYHEKFSTIYHLRKELADKKEKADLRLIYIALAHIIKFRGHFLIEDDSFDVRNTDISKQYQDFLEIFNTTFENNDLLSQNVDVEAILTDKISKSAKKDRILAQYPNQKSTGIFAEFLKLIVGNQADFKKYFNLEDKTPLQFAKDSYDEDLENLLGQIGDEFADLFSAAKKLYDSVLLSGILTVIDLSTKAPLSASMIQRYDEHREDLKQLKQFVKASLPEKYQEIFADSSKDGYAGYIEGKTNQEAFYKYLSKLLTKQEDSENFLEKIKNEDFLRKQRTFDNGSIPHQVHLTELKDIIRRQSEYYPFLKENQDRIEKILTFRIPYYIGPLAREKSDFAWMTRKTDDSIRPWNFEDLVDKEKSAEAFIHRMTNNDFYLPEEKVLPKHSLIYEKFTVYNELTKVRYKNEQGETYFFDSNIKQEIFDGVFKEHRKVSKKKLLDFLAKEYEEFRIVDVIGLDKENKAFNASLGTYHDLEKILDKDFLDNPDNESILEDIVQTLTLFEDREMIKKRLENYKDLFTESQLKKLYRRHYTGWGRLSAKLINGIRDKESQKTILDYLIDDGRSNRNFMQLINDDGLSFKSIISKAQAGSHSDNLKEVVGELAGSPAIKKGILQSLKIVDELVKVMGYEPEQIVVEMARENQTTNQGRRNSRQRYKLLDDGVKNLASNILKEYPTDNQALQNERLFLYYLQNGRDMYTGEALDIDNLSQYDIDHIIPQAFIKDDSIDNRVLVSSAKNRGKSDDVPSLEIVKDCKVFWKKLLDAKLMSQRKYDNLTKAERGGLTSDDKARFIQRQLVETRQITKHVARILDERFNNELDSKGRRIRKVKIVTLKSNLVSNFRKEFGFYKIREVNNYHHAHDAYLNAVVAKAILTKYPQLEPEFVYGDYPKYNSYKTRKATEKLFFYSNIMNFFKTKVTLADGTVVVKDDIEVNNDTGEIVWDKKKHFATVRKVLSYPQNNIVKKTEIQTGGFSKESILAHGNSDKLIPRKTKDIYLDPKKYGGFDSPIVAYSVLVVADIKKGKAQKLKTVTELLGITIMERSRFEKNPSAFLESKGYLNIRADKLIILPKYSLFELENGRRRLLASAGELQKGNELALPTQFMKFLYLASRYNESKGKPEEIEKKQEFVNQHVSYFDDILQLINDFSKRVILADANLEKINKLYQDNKENISVDELANNIINLFTFTSLGAPAAFKFFDKIVDRKRYTSTKEVLNSTLIHQSITGLYETRIDLGKLGED

SEQ ID NO: 90 - protein, 1365 aa, Streptococcus agalactiae
MNKPYSIGLDIGTNSVGWSIITDDYKVPAKKMRVLGNTDKEYIKKNLIGALLFDGGNTAADRRLKRTARRRYTRRRNRILYLQEIFAEEMSKVDDSFFHRLEDSFLVEEDKRGSKYPIFATMQEEKDYHEKFPTIYHLRKELADKKEKADLRLVYLALAHIIKFRGHFLIEDDRFDVRNTDIQKQYQAFLEIFDTSFENNHLLSQNVDVEAILTDKISKSAKKDRILAQYPNQKSTGIFAEFLKLIVGNQADFKKHFNLEDKTPLQFAKDSYDEDLENLLGQIGDEFADLFSAAKKLYDSVLLSGILTVTDLSTKAPLSASMIQRYDEHREDLKQLKQFVKASLPEKYQEIFADSSKDGYAGYIEGKTNQEAFYKYLSKLLTKQEDSEYFLEKIKNEDFLRKQRTFDNGSIPHQVHLTELKAIIRRQSEYYPFLKENQDKIEKILTFRIPYYVGPLARGNSDFAWMTRKTDDSIRPWNFEDLVDKEKSAEAFIHRMTNNDLYLPEEKVLPKHSLIYEKFTVYNELTKVRYKNEQGETYFFDSNVKQEIFDGVFKEHRKVSKKQLLDFLAKEFEEFRIVDVTGLDKENKAFNASLGTYHDLKKILDKDFLDNPDNESILEDIVQTITLFEDREMIKKRLENYKDLFTESQLKKLYRRHYTGWGRLSAKLINGIRDRESQKIILDYLISDGRANRNFMQLINDDGLSFKSIISKAQSGSHSDNLKEVVGELAGSPAIKKGILQSLKIVDELVKVMGYEPEQIVVEMARENQTTNQGRRNSRQRYKLLEDGVKNLASDILKEYPTDNQALQNERLFLYYLQNGRDMYTGEALDIDSLSQYDIDHIVPQAFIKDDSIDNRVLVSSAKNRGKSDDVPSIDIVKARKAFWKKLLDAKLISQRKYDNLTKAERGGLTPDDKAGFIQRQLVETRQITKHVARILDERFNNKVDDNNKPIRKVKIVTLKSNLVSNFRKEFGFYKIREVNNYHHAHDAYLNAVVAKAILTKYPQLEPEFVYGDYPKYNSYKTRKATEKLFFYSNIMNFFKTKVTLADETVVVKDDIEVNNETGEIAWDKKKHFATVRKVLSYPQVNIVKKTEVQTGGFSKESILAHSNSDKLIPRKTKDIYLDPKKYGGFDSPIVAYSVLVLADIKKGKAQKLKTVKELIGITIMERERFEKNPSAFLESKGYLNIRTDKLIILPKYSLFELENGRRRLLASAGELQKGNELALPTQYMKFLYLASRYNESKGKPEEIEKKQEFVNQHVSYFDDILQLINDFSKRVILADANLEKINKLYSDNKDNTPVDELAKNIINLFTFTSLGAPAAFKFFDKSVDRKRYTSTKEVLDSTLIHQSITGLYETRIDLGKLGED

SEQ ID NO: 91 - protein, 1365 aa, Streptococcus agalactiae
  misc_feature (9)..(9): Xaa can be any naturally occurring amino acid
MNKPYSIGXDIGTNSVGWSIITDDYKVPAKKMRVLGNTDKEYIKKNLIGALLFDGGNTAADRRLKRTARRRYTRRRNRILYLQEIFAEEMSKVDDSFFHRLEDSFLVEEDKRGSKYPIFATLQEEKDYHEKFSTIYHLRKELADKKEKADLRLIYIALAHIIKFRGHFLIEDDSFDVRNTDISKQYQDFLEIFNTTFENNDLLSQNVDVEAILTDKISKSAKKDRILAQYPNQKSTGIFAEFLKLIVGNQADFKKYFNLEDKTPLQFAKDSYDEDLENLLGQIGDEFADLFSAAKKLYDSVLLSGILTVIDLSTKAPLSASMIQRYDEHREDLKQLKQFVKASLPEKYQEIFADSSKDGYAGYIEGKTNQEAFYKYLSKLLTKQEDSENFLEKIKNEDFLRKQRTFDNGSIPHQVHLTELKAIIRRQSEYYPFLKENQDRIEKILTFRIPYYIGPLAREKSDFAWMTRKTDDSIRPWNFEDLVDKEKSAEAFIHRMTNNDFYLPEEKVLPKHSLIYEKFTVYNELTKVRYKNEQGETYFFDSNIKQEIFDGVFKEHRKVSKKKLLDFLAKEYEEFRIVDVIGLDKENKAFNASLGTYHDLEKILDKDFLDNPDNESILEDIVQTLTLFEDREMIKKRLENYKDLFTESQLKKLYRRHYTGWGRLSAKLINGIRDKESQKTILDYLIDDGRSNRNFMQLINDDGLSFKSIISKAQAGSHSDNLKEVVGELAGSPAIKKGILQSLKIVDELVKVMGYEPEQIVVEMARENQTTNQGRRNSRQRYKLLDDGVKNLASNILKEYPTDNQALQNERLFLYYLQNGRDMYTGEALDIDNLSQYDIDHIIPQAFIKDDSIDNRVLVSSAKNRGKSDDVPSLEIVKDCKVFWKKLLDAKLMSQRKYDNLTKAERGGLTSDDKARFIQRQLVETRQITKHVARILDERFNNELDSKGRRIRKVKIVTLKSNLVSNFRKEFGFYKIREVNNYHHAHDAYLNAVVAKAILTKYPQLEPEFVYGDYPKYNSYKTRKATEKLFFYSNIMNFFKTKVTLADGTVVVKDDIEVNNDTGEIVWDKKKHFATVRKVLSYPQNNIVKKTEIQTGGFSKESILAHGNSDKLIPRKTKDIYLDPKKYGGFDSPIVAYSVLVVADIKKGKAQKLKTVTELLGITIMERSRFEKNPSAFLESKGYLNIRADKLIILPKYSLFELENGRRRLLASAGELQKGNELALPTQFMKFLYLASRYNESKGKPEEIEKKQEFVNQHVSYFDDILQLINDFSKRVILADANLEKINKLYQDNKENISVDELANNIINLFTFTSLGAPAAFKFFDKIVDRKRYTSTKEVLNSTLIHQSITGLYETRIDLGKLGED

SEQ ID NO: 92 - protein, 1365 aa, Streptococcus agalactiae
MNKPYSIGLDIGTNSVGWSIITDDYKVPAKKMRVLGNTDKEYIKKNLIGALLFDGGNTAADRRLKRIARRRYTRRRNRILYLQEIFAEKMSKVDDSFFHRLEDSFLVEEDKRGSKYPIFATLQEEKDYHEKFPTIYHLRKELADKKEKADLRLVYLALAHIIKFRGHFLIEDDRFDVRNTDIQKQYQAFLEIFDTTFENNHLLSQNVDVEAILTDKISKSAKKDRILAQYPDQKSTGIFAEFLKLIVGNQADFKKHFNLEDKTPLQFAKDSYDEDLENLLGQIGDEFADLFSAAKKLYDSVLLSGILTVTDLSTKAPLSASMIQRYDEHREDLKQLKQFVKASLPEKYQEIFADSSKDGYAGYIEGKTNQEAFYKYLSKLLTKQEGSEYLLEKIKNEDFLRKQRTFDNGSIPHQVHLTELRAIIRRQSEYYPFLKENLDRIEKILTFRIPYYVGPLAREKSDFAWMTRKTDDSIRPWNFEELVDKEASAEAFIHCMTNNDLYLPEEKVLPKHSLIYEKFTVYNELTKVRYKNEQGETYFFDSNIKQEIFDGVFKEYRKVSKKQLLDFLAKEFEEFRIVDVTGLDKENKAFNASLGTYHDLEKILGKDFLDNPDNESILEDIVQTLTLFEDREMIKKRLDIYKDFFTESQLKKLYRRHYTGWGRLSAKLINGIRNKENQKTILDYLIDDGSANRNFMQLIKDAGLSFKSIISKAQSGSHSDNLKEVVSELAGSPAIKKGILQSLKIVDELVKVMGYKPEQIVVEMARENQTTNQGRRNSRQRYKLLDDGVRNLASNILKEYPTDNQALQNERLFLYYLQNGRDMYTEKALDIDNLSQYDIDHIIPQAFIKDDSIDNRVLVSSAKNRGKSDDVPSLEIVKDCKVFWKKLLDAKLMSQRKYDNLTKAERGGLTSDDKARFIQRQLVETRQITKHVARILDERFNNELDSKGRRIRKVKIVTLKSNLVSNFRKEFGFYKIREVNDYHHAHDAYLNAVVAKAILTKYPQLEPEFVYGDYPKYNSYKTRKATEKLFFYSNIMNFFKTKVTLADGTVVVKDDIEVNNDTGEIVWDKKKHFATVRKVLSYPQNNIVKKTEIQTGGFSKESILAHGNSDKLIPRKTKDIYLDPKKYGGFDSPIVAYSVLVVADIKKGKAQKLKTVTELLGITIMERSRFEKNPSAFLESKGYLNIRTDKLIILPKYSLFELENGRRRLLASAGELQKGNELALPTQFMKFLYLASRYNESKGKPEEIEKKQEFVNQHVSYFDDILQIINDFSNRVILADANLEKINKLYQDNKENISVDELANNIINLFTFTSLGAPAAFKFFDKIVDRKRYTSTKEVLNSTLIHQSITGLYETRIDLGKLGED

SEQ ID NO: 93 - protein, 1351 aa, Streptococcus anginosus
MNQKYSIGLDIGTNSVGWAVITDDYKVPAKKMKVLGNTDKQSIKKNLLGALLFDSGETAEATRLKRTARRRYTRRRNRLRYLQEIFAEEMMQVDESFFQRLDDSFLVDEDKRGERHPIFGNIAAEVKYHDEFPTIYHLRKHLADISQKADLRLVYLALAHMIKFRGHFLIEGQLKAENTNVQALFKDFVEVYDKTVEESHLSEITVDALSILTEKVSKSRRLENLIAHYPAEKKNTLFGNLIALFLGLQPNFKTNFQLSEDAKLQFSKDTYEEDLEGLLGEVGDEYADLFASAKNLYDAILLSGILTVDDNSTKAPLSASMVKRYEEHQKDLKKFEDFIKVNALDQYNAIFKDKNKKGYAGYIESGVKQDEFYKYLKGILLQINGSGDFLDKIDREDFLRKQRTFDNGSIPHQIHLQEMHAILRRQGEHYPFLKENQDKIEKILTFRIPYYVGPLARKGSRFAWAEYKADEKITPWNFDDILDKEKSAEKFITRMTLNDLYLPEEKVLPKHSLLYETFTVYNELTKVKYVNEQGEAKFFDANMKQEIFDHVFKENRKVTKDKLLNYLNKEFEEFRIVNLTGLDKENKVFNSSLGTYHDLRKILNKSFLDNKENAQIIEDIIQTLTLFEDREMIRQRLQKYSDIFTKAQLKKLERRHYTGWGRLSYKLINGIRNKENKKTILDYLIDDGYANRNFMQLINDDALSFKEEIAKAQIIGDVDDIANVVHDLPGSPAIKKGILQSVKIVDELVKVMGHNPANIIIEMARENQTTDRGRRNSQQRLKLLQDSLKPVNIKNVENQQLQNDRLFLYYIQNGKDMYTGETLDINNLSQYDIDHIIPQAYIKDDSFDNRVLTSSSENRGKSDNVPSIEVVCARKADWMRLRKAGLISQRKFDNLTKAERGGLTENDKAGFIKRQLVETRQITKHVAQVLDARFNAKHDENKKVIRDVKIITLKSNLVSQFRKDFKFYKVREINDYHHAHDAYLNAVIGTALLKKYPKLASEFVYGEFKKYDVSDKEIGKATAKYFFYSNLMNFFKKEVKFADGTVVERPDIETSEDGEIAWNKQTDFKIVRKVLSYPQVNIVKKTEVQTHGLDRPSPKPKPDSSENLVGVKRNLDPKKYGGYAGISNSYAVLVKAIIEKGVKKKETMVLEFQGISILDRITFEKDKRAFLLGKGYKDIKKIIELPKYSLFELKDGSRRMLASRGEIHKGNELFVPQKFTTLLYHAKRINNPINKDHIEYVKKHRDDFKELLNYVLEFNEKYVGATKNGERLKEAVADFDSKSNEEICTSFLGLFELTSLGSASDFEFLGVKIPRYRDYTPSSLLKDSTLIHQSITGLYETRIDLSKLGED

SEQ ID NO: 94 - protein, 1341 aa, Streptococcus anginosus
MKKEYSIGLDIGTNSVGWAVITDDYKVPAKKMKVLGNTDKQSIKKNLLGALLFDSGETAEATRLKRTARRRYTRRKNRLRYLQEIFTEEMNKVDENFFQRLDDSFLVEEDKQGSKYPIFGTLKEEKEYHKKFKTIYHLREELANSKEKADLRLVYLALAHMIKFRGHFLYEGDLKAENTDVQALFKDFVEEYDKTIEESHLSEITVDALSILTEKVSKSSRLENLIAHYPTEKKNTLFGNLIALSLGLQPNFKTNFQLSEDAKLQFSKDTYEEDLEELLGEIGDEYADLFASAKNLYDAILLSGILAVDDNTTKAPLSASMVKRYEEHQKDLKKLKDFIKVNAPDQYNAIFKDKNKKGYAGYIESGVEQDEFYKYLKGILLKINGSGDFLDKIDCEDFLRKQRTFDNGSIPHQIHLQEMHAILRRQGEHYPFLKENQDKIEKILTFRIPYYVGPLARKGSRFAWAEYKADEKITPWNFDDILDKEKSAEKFITRMTLNDLYLPEEKVLPKHSPLYETFTVYNELTKVKYVNEQGEAKFFDTNMKQEIFDHVFKENRKVTKDKLLNYLNKEFEEFRIVNLTGLDKENKAFNSSLGTYHDLRKILDKSFLDDKANEKTIEDIIQTLTLFEDREMIRQRLQKYSDIFTKAQLKKLERRHYTGWGRLSYKLINGIRNKENKKTILDYLIDDGYANRNFMQLINDDALSFKEEIARAQIIGDVDDIANVVHDLPGSPAIKKGILQSVKIVDELVKVMGHNPANIIIEMARENQTTDKGRRNSQQRLKLLQDSLKPVNIKNVENQQLQNDRLFLYYIQNGKDMYTGETLDINNLSQYDIDHIIPQAFIKDNSLDNRVLTRSDKNRGKSDDVPSIEVVHEMKSFWSKLLSVKLITQRKFDNLTKAERGGLTEEDKAGFIKRQLVETRQITKHVAQILDERFNTEFDGAQRRIRNVKIITLKSNLVSNFRKEFELYKVREINDYHHAHDAYLNAVVGNALLLKYPQLEPEFVYGEYPKYNSYRSRKSATEKFLFYSNILRFFKKEDIQTNEDGEIAWNKEKHIKILRKVLSYPQVNIVKKTEEQTGGFSKESILPKGESDKLIPRKTKNSYWNPKKYGGFDSPVVAYSILVFADVEKGKSKKLRKVQDMVGITIMEKKRFEKNPVDFLEQRGYRNVRLEKIIKLPKYSLFELENKRRRLLASARELQKGNELVIPQRFTTLLYHSYQIEKNYEPEHREYVEKHKDEFKELLEYISVFSRKYVLADNNLTKIEMLFSKNKDAEVSSLAKSFISLLTFTAFGAPAAFNFFGENIDRKRYTSVTECLNATLIHQSITGLYETRIDLSKLGED

SEQ ID NO: 95 - protein, 1341 aa, Streptococcus anginosus
MKKEYSIGLDIGTNSVGWAVITDDYKVPAKKMKVLGNTDKQSIKKNLLGALLFDSGETAEATRLKRTARRRYTRRRNRLRYLQEIFAEEMMQVDESFFQRLDDSFLVEEDKRGSRYPIFGNIAAEVKYHDDFPTIYHLRKHLVDISQKADLRLVYLALAHMIKFRGHFLIEGQLKAENTNVQALFKDFVEVYDKTVEESHLSEMTVDALSILTEKVSKSRRLENLVECYPTEKKNTLFGNLIALSLGLQPNFKTNFQLSEDAKLQFSKDTYEEDLEGLLGEIGDEYADLFASAKNLYDAILLSGILAVDDNTTKAPLSASMVKRYEEHQKDLKKLKDFIKVNAPAQYDDIFKDETKNGYAGYIENGVKQDEFYKYLKNTLSKIDGSDYFLDKIDREDFLRKQRTFDNGSIPHQIHLQEMHAILRRQGEHYPFLKENQDKIEKILTFRIPYYVGPLARKGSRFAWAEYKADEKITPWNFDDILDKEKSAEKFITRMTLNDLYLPEEKVLPKHSPLYETFTVYNELTKVKYVNEQGEAKFFDTNMKQEIFDHVFKENRKVTKDKLLNYLNKEFEEFRIVNLTGLDKENKAFNASLGTYHDLRKILDKSFLDDKVNEKIIEDIIQTLTLFEDREMIRQRLQKYSDIFTTQQLKKLERRHYTGWGRLSYKLINGIRNKENKKTILDYLIDDGYANRNFMQLINDDALSFKEEIARAQIIGDVDDIANVVHDLPGSPAIKKGILQSVKIVDELVKVMGHNPANIIIEMARENQTTDKGRRNSQQRLKLLQDSLKPVNIKNVENQQLQNDRLFLYYIQNGKDMYTGETLDINNLSQYDIDHIIPQAFIKDNSLDNRVLTRSDKNRGKSDDVPSIEVVHEMKSFWSKLLSVKLITQRKFDNLTKAERGGLTEEDKAGFIKRQLVETRQITKHVAQILDERFNTEFDGAQRRIRNVKIITLKSNLVSNFRKEFELYKVREINDYHHAHDAYLNAVVGNALLLKYPQLEPEFVYGEYPKYNSYRSRKSATEKFLFYSNILRFFKKEDIQTNEDGEIAWNKEKHIKILRKVLSYPQVNIVKKTEEQTGGFSKESILPKGESDKLIPRKTKNSYWNPKKYGGFDSPVVAYSILVFADVEKGKSKKLRKVQDMVGITIMEKKRFEKHPVDFLEQRGYRNVRLEKIIKLPKYSLFELENKRRRLLASARELQKGNELVIPQRFTTLLYHSYRIEKDYEPEHREYVEKHKDEFKELLEYISVFSRKYVLADNNLTKIEMLFSKNKDAEVSSLAKSFISLLTFTAFGAPAAFNFFGENIDRKRYTSVTECLNATLIHQSITGLYETRIDLSKLGED

SEQ ID NO: 96 - protein, 1341 aa, Streptococcus anginosus; identical to SEQ ID NO: 94

SEQ ID NO: 97 - protein, 1360 aa, Streptococcus caballi
MTKKNYSIGLDIGTNSVGWAVITDDYKVPAKKMKVLGNTDKKYIKKNLLGALLFDSGETAEATRLKRTARRRYTRRKNRLRYLQDIFTEEMAKVDDSFFQRLDESFLTDNDKNFDSHPIFGNKAEEDAYHQKFPTIYHLRKHLADSTEKADLRLVYLALAHMIKFRGHFLIEGELNAENTDVQKLFTDFVGVYDRTFDDSHLSEITVDAASILTEKISKSRRLENLINNYPKEKKNTLFGNLIALALGLQPNFKTNFKLSEDAKLQFSKDTYEEDLEELLGKIGDDYADLFTSSKNLYDAILLSGILTVDDNSTKAPLSASMIKRYVEHHEDLEKLKEFIKANKSELYHDIFKDKTQNGYAGYIENGVKQDEFYKYLKGILTKINGSDYFLDKIEREDFLRKQRTFDNGSIPHQIHLQEMHAILRRQGDYYPFLKENQEEIEKILTFRIPYYVGPLARKDSRFAWAEYRSDEKITPWNFDKVIDKEKSAEKFITRMTLNDLYLPEEKVLPKHSHVYETFAVYNELTKVKYVNEQGKDSFFDSNMKQEIFDHVFKENRKVTKEKLLNYLDKEFPEYRIQDLVGLDKENKSFNASLGTYHDLKKILDKSFLDDKVNEEVIEDIIKTLTLFEDREMIQQRLQKYSDIFTKQQLKKLERRHYTGWGRLSYKLINGIRNKENNKTILDYLIDDGSANRNFMQLINDDALSFKQIIQEAQVVGDVDDIETVVHDLPGSPAIKKGILQSVKIVDELIKVMGDNPDNIVIEMARENQTTNRGRSQSQQRLKKLQNSLKPSYIEDKVENSHLQNDQLFLYYIQNGKDMYTGDELDIDHLSDYDIDHIIPQAFIKDDSIDNRVLTSSAKNRGKSDDVPSLGIVRARKAEWVRLYKSGLISKRKFDNLTKAERGGLTEADKAGFIKRQLVETRQITKHVAQILDARFNTERDENDKVIRDVKVITLKSNLVSQFRKEFKFYKVREINDYHHAHDAYLNAVVGTALLKKYPKLAPEFVYGEYKKYDVSSDDHSEMGKATAKYFFYSNLMNFFKRVIRYSNGKVIVRPVVEYSKDTGEIAWNKRTDFEKVRKVLSYPQVNIVKKVETQTGGFSKESILPKGDSDKLIPRKTKKVLWEPKKYGGFDSPTVAYSVLVVADVEKGKTKKLKTVKELVGISIMERSFFEKNPVEFLKNKGYQNVQEDKLMKLPKYSLFEFEGGRRRLLASATELQKGNEIMLSAHLVALLYHAHRIGNFNSAEHLKYVSEHKKEFEEVLSCVENFANVYVDVEKNLSKIRAAADSMDNFSIEEISDSFINLLTLTALGAPADFNFLGEKIPRKRYNSTKECLNATLIHQSITGLYETRIDLSKLGEE

SEQ ID NO: 98 - protein, 1355 aa, Streptococcus canis
MEKKYSIGLDIGTNSVGWAVITDDYKVPSKKFKVLGNTNRKSIKKNLMGALLFDSGETAEATRLKRTARRRYTRRKNRIRYLQEIFANEMAKLDDSFFQRLEESFLVEEDKKNERHPIFGNLADEVAYHRNYPTIYHLRKKLADSPEKADLRLIYLALAHIIKFRGHFLIEGKLNAENSDVAKLFYQLIQTYNQLFEESLDEIEVDAKGILSARLSKSKRLEKLIAVFPNEKKNGLFGNIIALALGLTPNFKSNFDLTEDAKLQLSKDTYDDDLDELLGQIGDQYADLFSAAKNLSDAILLSDILRSNSEVTKAPLSASMVKRYDEHHQDLALLKTLVRQQFPEKYAEIFKDDTKNGYAGYVGIGATQEEFYKFIKPILEKMDGAEELLAKLNRDDLLRKQRTFDNGSIPHQIHLKELHAILRRQEEFYPFLKENREKIEKILTFRIPYYVGPLARGNSRFAWLTRKSEEAITPWNFEEVVDKGASAQSFIERMTNFDEQLPNKKVLPKHSLLYEYFTVYNELTKVKYVTERMRKPEFLSGEQKKAIVDLLFKTNRKVTVKQLKEDYFKKIECFDSVEIIGVEDRFNASLGTYHDLLKIIKDKDFLDNEENEDILEDIVLTLTLFEDREMIEERLKTYAHLFDDKVMKQLKRRHYTGWGRLSRKMINGIRDKQSGKTILDFLKDGFSNRNFMQLIHDDSLTFKEEIEKAQVSGQGDSLHEQIADLAGSPAIKKGILQTVKIVDELVKVMGHKPENIVIEMARENQTTTKGLQQSRERKKRIEEGIKELESQILKENPVENTQLQNEKLYLYYLQNGRDMYVDQELDINRLSDYDVDHIVPQSFIKDDSIDNKVLTRSVENRGKSDNVPSEEVVKKMKNYWRQLLNAKLITQRKFDNLTKAERGGLSEADKAGFIKRQLVETRQITKHVARILDSRMNTKRDKNDKPIREVKVITLKSKLVSDFRKDFQLYKVRDINNYHHAHDAYLNAVVGTALIKKYPKLESEFVYGDYKVYDVSEQEIGKATAKRFFYSNIMNFFKTEVKLANGEIRKRPLIETNGETGEVVWNKEKDFATVRKVLAMPQVNIVKKTEVQTGGFSKESILSKRESAKLIPRKKGWDTRKYGGFGSPTVAYSILVVAKVEKGKAKKLKSVKVLVGITIMEKGSYEKDPIGFLEAKGYKDIKKELIFKLPKYSLFELENGRRRMLASELQKANELVLPQHLVRLLYYTQNISATTGSNNLGYIEQHREEFKEIFEKIIDFSEKYILKNKVNSNLKSSFDEQFAVSDSILLSNSFVSLLKYTSFGASGGFTFLDLDVKQGRLRYQTVTEVLDATLIYQSITGLYETRTDLSQLGGD

SEQ ID NO: 99 - protein, 1341 aa, Streptococcus constellatus
MGKPYSIGLDIGTNSVGWAVVTDDYKVPAKKMKVLGNTDKQSIKKNLLGALLFDSGETAEATRLKRTARRRYTRRKNRLRYLQEIFTGEMNKVDENFFQRLDDSFLVDEDKRGEHHPIFGNIAAEVKYHDDFPTIYHLRRHLADTSKKADLRLVYLALAHMIKFRGHFLYEGDLKAENTDVQALFKDFVEEYDKTIEESHLSEITVDALSILTEKVSKSSRLENLIAHYPTEKKNTLFGNLIALSLDLHPNFKTNFQLSEDAKLQFSKDTYEEDLEGFLGEVGDEYADLFASAKNLYDAILLSGILTVDDNSTKAPLSASMVKRYEEHQKDLKKLKDFIKVNAPDQYNAIFKDKNKKGYASYIESGVKQDEFYKYLKGILLKINGSGDFLDKIDREDFLRKQRTFDNGSIPHQIHLQEMHAILRRQGEHYPFLKENQDKIEKILTFRIPYYVGPLARKGSRFAWAEYKADEKITPWNFDDILDKEKSAEKFITRMTLNDLYLPEEKVLPKHSPLYEAFTVYNELTKVKYVNEQGEAKFFDTNMKQEIFDHVFKENRKVTKDKLLNYLNKEFEEFRIVNLTGLDKENKAFNSSLGTYHDLRKILDKSFLDDKANEKTIEDIIQTLTLFEDREMIRQRLQKYSDIFTKAQLKKLERRHYTGWGRLSYKLINGIRNKENKKTILDYLIDDGYANRNFMQLINDDALSFKEEIARAQIIDDVDDIANVVHDLPGSPAIKKGILQSVKIVDELVKVMGHNPANIIIEMARENQTTDKGRRNSQQRLKLLQDSLKPVNIKNVENQQLQNDRLFLYYIQNGKDMYTGETLDINNLSQYDIDHIIPQAFIKDNSLDNRVLTRSDKNRGKSDDVPSIEVVHEMKSFWSKLLSVKLITQRKFDNLTKAERGGLTEEDKAGFIKRQLVETRQITKHVAQILDERFNTEFDGNKRRIRNVKIITLKSNLVSNFRKEFELYKVREINDYHHAHDAYLNAVVGNALLLKYPQLEPEFVYGEYPKYNSYRSRKSATEKFLFYSNILRFFKKEDIQTNEDGEIAWNKEKHIKILRKVLSYPQVNIVKKTEEQTGGFSKESILPKGESDKLIPRKTKNSYWDPKKYGGFDSPVVAYSILVFADVEKGKSKKLRKVQDMVGITIMEKKRFEKNPVDFLEQRGYRNVRLEKIIKLPKYSLFELENKRRRLLASAKELQKGNELVIPQRFTTLLYHSYRIEKDYEPEHREYVEKHKDEFKELLEYISVFSRKYVLADNNLTKIEMLFSKNKDAEVSSLAKSFISLLTFTAFGAPAAFNFFGENIDRKRYTSVTECLNATLIHQSITGLYETRIDLSKLGED

SEQ ID NO: 100 - protein, 1355 aa, Streptococcus constellatus
MTQKYSIGLDIGTNSVGWAIVTDDYKVPAKKMKILGNTNKQYIKKNLLGALLFDSGETAKATRLKRTARRRYTRRKNRLRYLQEIFIEEMNKVDENFFQRLDDSFLVTEDKRGSKYPIFGTLKEEKEYYKEFETIYHLRKRLADSTGKVDLRLVYLALAHMIKFRGHFLIEGQLKAENTDVQTLFNDFVEVYDKTIEESHLAEITVDALSILTEKVSKSRRLENLVKCYPTEKKNTLFGNLIALSLGLQPNFKTNFQLSEDAKLQFSKDTYEEDLEELLGKIGDDYADLFTSAKNLYDTILLSGILAVDDNSTKALLSASMIKRYEEHQKDLKKLKDFIKVNAPAQYDDIFKDETKNGYAGYIENGVKQDEFYKYLKNTLSKIDGSGYFLDKIEREDFLRKQRTFDNGSIPHQIHLQEMHAILRRQGEHYPFLKENQDKIEKILTFRIPYYVGPLVRKGSRFAWAEYKADEKITPWNFDDILDKEKSAEKFITRMTLNDLYLPEEKVLPKHSLLYEIFTVYNELTKVKYVNEQGEAKFFDANMKQEIFDHVFKENPKVTKDKLLNYLDKEFDEFRIVDLTGLDKENKAFNASLGTYHDLRKILDKSFLDDKANEKTIEDIIQTLTLFEDREMIRQRLQKYSDIFTKAQLKKLERRHYTGWGRLSYKLINGIRNKENNKTILEYLVDDGYANRNFMQLINDDTLPFKQIIKDAQAIDDVDDIELIVHDLPGSPAIKKGILQSIKIVDELVKVMGYNPDNIVIEMARENQTTTKGRRNSQQRLKLLQDSLTPVSIKNVENQQLQNDRLFLYYIQNGKDMYTGEELDIHHLSDYDIDHIIPQAFIKDDSIDNRVLTSSAKNRGKSDNVPNLEVVCDRKADWIRLREAGLISQRKFDNLTKAERGGLTENDKAGFIHRQLVETRQITKHVAQILDARFNPKRDDNKKVIRDVKIITLKSNLVSQFRRDFKLYKVREINDYHHAHDAYLNAVVGTALLKKYPKLTSEFVYGEYKKYDVSDNDEIGKATAKYFFYSNLMNFFKTEVKFADGTVVERPDIETSEDGEIAWNKQTDFKIVRKVLSYPQVNIVKKVEKQTGRFSKESILPKGDSDKLIARKTKENYWDTKKYGGFDSPTVAYSVLVVADIKKGKAKKLKTVKELVGISIMERPFFEKNPIMFLESKGYRNIQKDKLIKLPKYSLFEFEGGRRRLLASAVELQKGNEMVLPQYLNNLLYHAHRIDNSDNSEHLKYITEHKEEFGKLLSYIENFAKSYVDVDKNLEKIQLAVEKIDSFSVKEISNSFIHLLTLTALGAPADFNFLGEKIPRKRYTSTKECLNATLIHQSITGLYETQTDLSKLGED

SEQ ID NO: 101 - protein, 1356 aa, Streptococcus dysgalactiae
MDKKYSIGLDIGTNSVGWAVITDDYKVPSKKFKVLGNTDRHSIKKNLIGALLFDSGETAEATRLKRTARRRYTRRKNRIRYLQEIFSSEMSKVDDSFFHRLEESFLVEEDKKHERHPIFGNIVDEVAYHEKYPTIYHLRKKLADSTDKADLRLIYLALAHMIKFRGHFLIEGDLNPDNSDMDKLFIQLVQTYNQLFEENINASRVDAKAILSARLSKSRRLENLIAQLPGEKRNGLFGNLIALSLGLTPNFKSNFDLAEDAKLQLSKDTYDDDLDNLLAQIGDQYADLFLAAKNLSDAILLSDILRVNSEITKAPLSASMIKRYDEHHQDLTLLKALVRQQLPEKYKEIFFDQSKNGYAGYIDGGASQEEFYKFIKPILEKMDGTEELLAKLNREDLLRKQRTFDNGSIPHQIHLGELHAILRRQEDFYPFLKDNREKIEKILTFRIPYYVGPLARGNSRFAWMTRKSEETITPWNFEEVVDKGASAQSFIERMTNFDKNLPNEKVLPKHSLLYEYFTVYNELTKVKYVTEGMRKPEFLSGKQKEAIVDLLFKTNRKVTVKQLKEDYFKKIECFDSVEISGVEDRFNASLGTYHDLLKIIKDKDFLDNEENEDILEDIVLTLTLFEDKEMIEERLKKYANLFDDKVMKQLKRRHYTGWGRLSRKLINGIRDKQSGKTILDFLKDGFANRNFMQLINDDSLTFKEAIQKAQVSGQGHSLHEQIANLAGSPAIKKGILQSVKVVDELVKVMGHKPENIVIEMARENQTTQKGQKNSRERMKRIEEGIKELGSQILKEHPVENTQLQNEKLYLYYLQNGRDMYVDQELDINRLSDYDVDHIVPQSFIKDDSIDNKILTRSDKNRGKSDNVPSEEVVKKMKNYWRQLLNAKLITQRKFDNLTKAERGGLSELDKAGFIKRQLVETRQITKHVAQILDSRMNTKYDENDKLIREVKVITLKSKLVSDFRKDFQFYKVREINNYHHAHDAYLNAVVGTALIKKYTKLESEFVYGDYKVYDVSEQEIGKATAKRFFYSNIMNFFKTEITLANGEIRKRPLIETNEETGEIVWDKGRDFATVRKVLSMPQVNIVKKTEVQTGALTNESIYARGSFDKLISRKHRFESSKYGGFGSPTVTYSVLVVAKSKVQDGKVKKIKTGKELIGMTLLDKLVFEKNPLKFIEDKGYGNVQIDKCIKLPKYSLFEFENGTRRMLASRGDLQKANEMFLPAKLVTLLYHAHKIESSKELEHEAYILDHYNDLYQLLSYIERFASLYVDVEKNISKVKELFSNIESYSISEICSSVINLLTLTASGAPADFKFLGTTIPRKRYGSPQSILSSTLIHQSITGLYETRIDLSQLGGD

SEQ ID NO: 102 - protein, 1356 aa, Streptococcus dysgalactiae
MDKKYSIGLDIGTNSVGWAVITDDYKVPSKKFKVLGNTDRHSIKKNLIGALLFDSGETAEATRLKRTARRRYTRRKNRIRYLQEIFSSEMSKVDDSFFHRLEESFLVEEDKKHERHPIFGNIVDEVAYHEKYPTIYHLRKKLADSTDKADLRLIYLALAHMIKFRGHFLIEGDLNPDNSDVDKLFIQLVQTYNQLFEEKINASGVDAKAILSARLSKSKRLENLIAQLPGEKKNGLFGNLIALSLGLTPNFKSNFDLAEDAKLQLSKDTYDDDLDNLLAQIGNQYADLFLAAKNLSDAILLSDILRVNSEITKAPLSASMIKRYDEHHQDLTLLKALVRQQLPEKYKEIFFDQSKNGYAGYIDGGASQEEFYKFIKPILEKMDGTEELLAKLNREDLLRKQRTFDNGSIPHQIHLGELHAILRRQEDFYPFLKDNREKIEKILTFRIPYYVGPLARGNSRFAWMTRKSEETITPWNFEEVVDKGASAQSFIERMTNFDKNLPNEKVLPKHSLLYEYFTVYNELTKVKYVTEGMRKPEFLSGKQKEAIVDLLFKTNRKVTVKQLKEDYFKKIECFDSVEISGVEDRFNASLGTYHDLLKIIKDKDFLDNEENEDILEDIVLTLTLFEDKEMIEERLKKYANLFDDKVMKQLKRRHYTGWGRLSRKLINGIRDKQSGKTILDFLKDGFANRNFMQLINDDSLTFKEAIQKAQVSGQGHSLHEQIANLAGSPAIKKGILQSVKVVDELVKVMGHKPENIVIEMARENQTTQKGQKNSRERMKRIEEGIKELGSQILKEHPVENTQLQNEKLYLYYLQNGRDMYVDQELDINRLSDYDVDHIVPQSFIKDDSIDNKVLTRSDKNRGKSDNVPSEEVVKKMKNYWRQLLNAKLITQRKFDNLTKAERGGLSELDKAGFIKRQLVETRQITKHVAQILDSRMNTKYDENDKLIREVKVITLKSKLVSDFRKDFQFYKVREINNYHHAHDAYLNAVVGTALIKKYPKLESEFVYGDYKVYDVSEQEIGKATAKRFFYSNIMNFFKTEITLANGEIRKRPLIETNEETGEIVWDKGRDFATVRKVLSMPQVNIVKKTEVQTGALTNESIYARGSFDKLISRKHRFESSKYGGFGSPTVTYSVLVVAKSKVQDGKVKKIKTGKELIGITLLDKLVFEKNPLKFIEDKGYGNVQIDKCIKLPKYSLFEFENGTRRMLASRGDLQKANEMFLPAKLVTLLYHAHKIESSKELEHEAYILDHYNDLYQLLSYIERFASLYVDVEKNISKVKELFSNIESYSISEICSSVINLLTLTASGAPADFKFLGTTIPRKRYGSPQSILSSTLIHQSITGLYETRIDLSQLGGD

SEQ ID NO: 103 - protein, 1356 aa, Streptococcus dysgalactiae
MDKKYSIGLDIGTNSVGWAVITDDYKVPSKKFKVLGNTDRHSIKKNLIGALLFDSGETAEATRLKRTARRRYTRRKNRIRYLQEIFSSEMSKVDDSFFHRLEESFLVEEDKKHERHPIFGNIVDEVAYHEKYPTIYHLRKKLADSTDKADLRLIYLALAHMIKFRGHFLIEGDLNPDNSDMDKLFIQLVQTYNQLFEENINASRVDAKAILSARLSKSRRLENLIAQLPGEKRNGLFGNLIALSLGLTPNFKSNFDLAEDAKLQLSKDTYDDDLDNLLAQIGDQYADLFLAAKNLSDAILLSDILRVNSEITKAPLSASMIKRYDEHHQDLTLLKALVRQQLPEKYKEIFFDQSKNGYAGYIDGGASQEEFYKFIKPILEKMDGTEELLAKLNREDLLRKQRTFDNGSIPHQIHLGELHAILRRQEDFYPFLKDNREKIEKILTFRIPYYVGPLARGNSRFAWMTRKSEETITPWNFEEVVDKGASAQSFIERMTNFDKNLPNEKVLPKHSLLYEYFTVYNELTKVKYVTEGMRKPEFLSGKQKEAIVDLLFKTNRKVTVKQLKEDYFKKIECFDSVEISGVEDRFNASLGTYHDLLKIIKDKDFLDNEENEDILEDIVLTLTLFEDKEMIEERLKTYAHLFDDKVMKQLKRRHYTGWGRLSRKLINGIRDKQSGKTILDFLKDGFANRNFIQLIHDDSLTFKEAIQKAQVSGQGHSLHEQIANLAGSPAIKKGILQSVKVVDELVKVMGHKPENIVIEMARENQTTQKGQKNSRERMKRIEEGIKELGSQILKEHPVENTQLQNEKLYLYYLQNGRDMYVDQELDINRLSDYDVDHIVPQSFIKDDSIDNKVLTRSDKNRGKSDDVPSEEVVKKMKNYWRQLLNAKLITQRKFDNLTKAERGGLSELDKAGFIKRQLVETRQITKHVAQILDSRMNTKYDENDKLIREVKVITLKSKLVSDFRKDFQFYKVREINNYHHAHDAYLNAVVGTALIKKYPKLESEFVYGDYKVYDVSEQEIGKATAKRFFYSNIMNFFKTEITLANGEIRKRPLIETNEETGEIVWNKGRDFATVRKVLSMPQVNIVKKTEVQTGALTNESIYARGSFDKLISRKHRFESSKYGGFGSPTVTYSVLVVAKSKVQDGKVKKIKTGKELIGITLLDKLVFEKNPLKFIEDKGYGNVQIDKCIKLPKYSLFEFENGTRRMLASRGDLQKANEMFLPAKLVTLLYHAHKIESSKELEHEAYILDHYNDLYQLLSYIERFASLYVDVEKNISKVKELFSNIESYSISEICSSVINLLTLTASGAPADFKFLGTTIPRKRYGSPQSILSSTLIHQSITGLYETRIDLSQLGGD

SEQ ID NO: 104 - protein, 1356 aa, Streptococcus dysgalactiae
MDKKYSIGLDIGTNSVGWAVITDDYKVPSKKFKVLGNTDRHSIKKNLIGALLFDSGETAEATRLKRTARRRYTRRKNRIRYLQEIFSSEMSKVDDSFFHRLEESFLVEEDKKHERHPIFGNIVDEVAYHEKYPTIYHLRKKLADSTDKADLRLIYLALAHMIKFRGHFLIEGDLNPDNSDMDKLFIQLVQTYNQLFEENINASRVDAKAILSARLSKSRRLENLIAQLPGEKRNGLFGNLIALSLGLTPNFKSNFDLAEDAKLQLSKDTYDDDLDNLLAQIGDQYADLFLAAKNLSDAILLSDILRVNSEITKAPLSASMIKRYDEHHQDLTLLKALVRQQLPEKYKEIFFDQSKNGYAGYIDGGASQEEFYKFIKPILEKMDGTEELLAKLNREDLLRKQRTFDNGSIPHQIHLGELHAILRRQEDFYPFLKDNREKIEKILTFRIPYYVGPLARGNSRFAWMTRKSEETITPWNFEEVVDKGASAQSFIERMTNFDKNLPNEKVLPKHSLLYEYFTVYNELTKVKYVTEGMRKPEFLSGKQKEAIVDLLFKTNRKVTVKQLKEDYFKKIECFDSVEISGVEDRFNASLGTYHDLLKIIKDKDFLDNEENEDILEDIVLTLTLFEDKEMIEERLKKYANLFDDKVMKQLKRRHYTGWGRLSRKLINGIRDKQSGKTILDFLKDGFANRNFMQLINDDSLTFKEAIQKAQVSGQGHSLHEQIANLAGSPAIKKGILQSVKVVDELVKVMGHKPENIVIEMARENQTTQKGQKNSRERMKRIEEGIKELGSQILKEHPVENTQLQNEKLYLYYLQNGRDMYVDQELDINRLSDYDVDHIVPQSFIKDDSIDNKVLTRSDKNRGKSDNVPSEEVVKKMKNYWRQLLNAKLITQRKFDNLTKAERGGLSELDKAGFIKRQLVETRQITKHVAQILDSRMNTKYDENDKLIREVKVITLKSKLVSDFRKDFQFYKVREINNYHHAHDAYLNAVVGTALIKKYPKLESEFVYGDYKVYDVSEQEIGKATAKRFFYSNIMNFFKTEITLANGEIRKRPLIETNEETGEIVWDKGRDFATVRKVLSMPQVNIVKKTEVQTGALTNESIYARGSFDKLISRKHRFESSKYGGFGSPTVTYSVLVVAKSKVQDGKVKKIKTGKELIGITLLDKLVFEKNPLKFIEDKGYGNVQIDKCIKLPKYSLFEFENGTRRMLASRGDLQKANEMFLPAKLVTLLYHAHKIESSKELEHEAYILDHYNDLYQLLSYIERFASLYVDVEKNISKVKELFSNIESYSISEICSSVINLLTLTASGAPADFKFLGTTIPRKRYGSPQSILSSTLIHQSITGLYETRIDLSQLGGD

SEQ ID NO: 105 - protein, 1356 aa, Streptococcus dysgalactiae
MDKKYSIGLDIGTNSVGWAVITDDYKVPSKKFKVLGNTDRHSIKKNLIGALLFDSGETAEATRLKRTARRRYTRRKNRIRYLQEIFSSEMSKVDDSFFHRLEESFLVEEDKKHERHPIFGNIVDEVAYHEKYPTIYHLRKKLADSTDKADLRLIYLALAHMIKFRGHFLIEGDLNPDNSDMDKLFIQLVQTYNQLFEENINASRVDAKAILSARLSKSRRLENLIAQLPGEKRNGLFGNLIALSLGLTPNFKSNFDLAEDAKLQLSKDTYDDDLDNLLAQIGDQYADLFLAAKNLSDAILLSDILRVNSEITKAPLSASMIKRYDEHHQDLTLLKALVRQQLPEKYKEIFFDQSKNGYAGYIDGGASQEEFYKFIKPILEKMDGTEELLAKLNREDLLRKQRTFDNGSIPHQIHLGELHAILRRQEDFYPFLKDNREKIEKILTFRIPYYVGPLARGNSRFAWMTRKSEETITPWNFEEVVDKGASAQSFIERMTNFDKNLPNEKVLPKHSLLYEYFTVYNELTKVKYVTEGMRKPEFLSGKQKEAIVDLLFKTNRKVTVKQLKEDYFKKIECFDSVEISGVEDRFNASLGTYHDLLKIIKDKDFLDNEENEDILEDIVLTLTLFEDKEMIEERLKTYAHLFDDKVMKQLKRRHYTGWGRLSRKLINGIRDKQSGKTILDFLKDGFANRNFIQLIHDDSLTFKEAIQKAQVSGQGHSLHEQIANLAGSPAIKKGILQSVKVVDELVKVMGHKPENIVIEMARENQTTQKGQKNSRERMKRIEEGIKELGSQILKEHPVENTQLQNEKLYLYYLQNGRDMYVDQELDINRLSDYDVDHIVPQSFIKDDSIDNKVLTRSDKNRGKSDDVPSEEVVKKMKNYWRQLLNAKLITQRKFDNLTKAERGGLSELDKAGFIKRQLVETRQITKHVAQILDSRMNTKYDENDKLIREVKVITLKSKLVSDFRKDFQFYKVREINNYHHAHDAYLNAVVGTALIKKYPKLESEFVYGDYKVYDVSEQEIGKATAKRFFYSNIMNFFKTEITLANGEIRKRPLIETNEETGEIVWDKGRDFATVRKVLSMPQVNIVKKTEVQTGALTNESIYARGSFDKLISRKHRFESSKYGGFGSPTVTYSVLVVAKCKVQDGKVKKIKTGKELIGITLLDKLVFEKNPLKFIEDKGYGNVQIDKCIKLPKYSLFEFENGTRRMLASRGDLQKANEMFLPAKLVTLLYHAHKIESSKELEHEAYILDHYNDLYQLLSYIERFASLYVDVEKNISKVKELFSNIESYSISEICSSVINLLTLTASGAPADFKFLGTTIPRKRYGSPQSILSSTLIHQSITGLYETRIDLSQLGGD

SEQ ID NO: 106 - protein, 1356 aa, Streptococcus dysgalactiae
MDKKYSIGLDIGTNSVGWAVITDDYKVPSKKFKVLGNTDRHSIKKNLIGALLFDSGETAEATRLKRTARRRYTRRKNRIRYLQEIFSSEMSKVDDSFFHRLEESFLVEEDKKHERHPIFGNIVDEVAYHEKYPTIYHLRKKLADSTDKADLRLIYLALAHMIKFRGHFLIEGDLNPDNSDVDKLFIQLVQTYNQLFEENINASRVDAKAILSARLSKSRRLENLIAQLPGEKRNGLFGNLIALSLGLTPNFKSNFDLAEDAKLQLSKDTYDDDLDNLLAQIGDQYADLFLAAKNLSDAILLSDILRVNSEITKAPLSASMIKRYDEHHQDLTLLKALVRQQLPEKYKEIFFDQSKNGYAGYIDGGASQEEFYKFIKPILEKMDGTEELLAKLNREDLLRKQRTFDNGSIPHQIHLGELHAILRRQEDFYPFLKDNREKIEKILTFRIPYYVGPLARGNSRFAWMTRKSEETITPWNFEEVVDKGASAQSFIERMTNFDKNLPNEKVLPKHSLLYEYFTVYNELTKVKYVTEGMRKPAFLSGEQKKAIVDLLFKTNRKVTVKQLKEDYFKKIECFDSVEISGVEDRFNASLGTYHDLLKIIKDKDFLDNEENEDILEDIVLTLTLFEDKEMIEERLKTYAHLFDDKVMKQLKRRHYTGWGRLSRKLINGIRDKQSGKTILDFLKDGFANRNFIQLIHDDSLTFKEAIQKAQVSGQGHSLHEQIANLAGSPAIKKGILQSVKVVDELVKVMGHKPENIVIEMARENQTTQKGQKNSRERMKRIEEGIKELGSQILKEHPVENTQLQNEKLYLYYLQNGRDMYVDQELDINRLSDYDVDHIVPQSFIKDDSIDNKVLTRSDKNRGKSDNVPSEEVVKKMKNYWRQLLNAKLITQRKFDNLTKAERGGLSELDKAGFIKRQLVETRQITKHVAQILDSRMNTKYDENDKLIREVKVITLKSKLVSDFRKDFQFYKVREINNYHHAHDAYLNAVVGTALIKKYPKLESEFVYGDYKVYDVSEQEIGKATAKRFFYSNIMNFFKTEITLANGEIRKRPLIETNEETGEIVWDKGRDFATVRKVLSMPQVNIVKKTEVQTGALTNESIYARGSFDKLISRKHRFESSKYGGFGSPTVTYSVLVVAKSKVQDGKVKKIKTGKELIGITLLDKLVFEKNPLKFIEDKGYGNVQIDKCIKLPKYSLFEFENGTRRMLASRGDLQKANEMFLPAKLVTLLYHAHKIESSKELEHEAYILDHYNDLYQLLSYIERFASLYVDVEKNISKVKELFSNIESYSISEICSSVINLLTLTASGAPADFKFLGTTIPRKRYGSPQSILSSTLIHQSITGLYETRIDLSQLGGD

SEQ ID NO: 107 - protein, 1345 aa, Streptococcus equi
MKKPYTIALDIGTNSVGWVVVTDDYRVPTKKMKVLGNTERKTIKKNLIGALLFDSGDTAEGTRLKRTARRRYTRRKNRLRYLKEIFTEEMAKVDDGFFQRLEDSFYVLEDKEGNKHPIFANLADEVAYHKKYPTIYHLRKELVDNPQKADLRLIYLAVAHIIKFRGHFLIEGTLSSKNNNLQKSFDHLVDTYNLLFEEQLLTEGINAKELLSAALSKSKRLENLISLIPGQKKTGIFGNIIALSLGLTPNFKANFGLSKDVKLQLAKDTYADDLDSLLAQIGDQYADLFLAAKNLSDAILLSDILTESDEITRAPLSASMVKRYREHHKDLVTLKTLIKDQLPEKYQEIFLDKTKNGYAGYIEGQVSQEEFYKYLKPILARLDGSEPLLLKIDREDFLRKQRTFDNGSIPHQIHLEELHAILRRQEVFYPFLKDNRKKIESLLTFRIPYYVGPLARGHSRFAWVKRKFDGAIRPWNFEEIVDEEASAQIFIEKMTKNDLYLPNEKVLPKHSLLYETFTVYNELTKVKYATEGMTRPQFLSADQKQAIVDLLFKTNRKVTVKQLKENYFKKIECWDSVEITGVEDSFNASLGTYHDLLKIIQDKDFLDNPDNQKIIEDIILTLTLFEDKKMISKRLDQYAHLFDKVVLNKLERHHYTGWGRLSGKLINGIRDKQSGKTILDFLKDGFANRNFMQLIHDSELSFIDEIAKAQVIGKTEYSKDLVGNLAGSPAIKKGISQTIKIVDELVKIMGYLPQQIVIEMARENQTTAQGIKNARQRMRKLEETAKKLGSNILKEHPVDNSQLQNDKRYLYYLQNGKDMYTGDDLDIDYLSSYDIDHIIPQSFIKNNSIDNKVLTSQGANRGKLDNVPSEAIVRKMKGYWQSLLRAGAISKQKFDNLTKAERGGLTQVDKAGFIQRQLVETRQITKHVAQILDSRFNTEFDDHNKRIRKVHIITLKSKLVSDFRKEFGLYKIRDINHYHHAHDAYLNAVVAKAILGKYPQLAPEFVYGDYPKYNSFKERQKATQKMLFYSNILKFFKDQESLHVNSDGEEIWNANKHLPIIKNVLSIPQVNIVKKTEVQTGGFYKESILSKGNSDKLIPRKNNWDTRKYGGFDSPTVAYSVLVIAKMEKGKAKVLKPVKEMVGITIMERTAFEENPVVFLEARGYREIQEHLIIKLPKYSLFELENGRRRLLASSELQKGNELFLPVDYMTFLYLAAHYHELTGSSEDVLRKKYFVDRHLHYFDDIIQMINDFAERHILASSNLEKINHTYHNNSDLPVNERAENIINVFTFVALGAPAAFKFFDATIDRKRYTSTKEVLNATLIHQSVTGLYETRIDLSQLGEN

SEQ ID NO: 108 - protein, 1345 aa, Streptococcus equi
MKKPYTIALDIGTNSVGWVVVTDDYRVPTKKMKVLGNTERKTIKKNLIGALLFDSGDTAEGTRLKRTARRRYTRRKNRLRYLKEIFTEEMAKVDDGFFQRLEDSFYVLEDKEGNKHPIFANLADEVAYHKKYPTIYHLRKELVDNPQKADLRLIYLAVAHIIKFRGHFLIEGTLSSKNNNLQKSFDHLVDTYNLLFEEQLLTEGINAKELLSAALSKSKRLENLISLIPGQKKTGIFGNIIALSLGLTPNFKANFGLSKDVKLQLAKDTYADDLDSLLAQIGDQYADLFLAAKNLSDAILLSDILTESDEITRAPLSASMVKRYREHHKDLVTLKTLIKDQLPEKYQEIFLDKTKNGYAGYIEGQVSQEEFYKYLKPILARLDGSEPLLLKIDREDFLRKQRTFDNGSIPHQIHLEELHAILRRQEVFYPFLKDNRKKIESLLTFRIPYYVGPLARGHSRFAWVKRKFDGAIRPWNFEEIVDEEASAQIFIEKMTKNDLYLPNEKVLPKHSLLYETFTVYNELTKVKYATEGMTRPQFLSADQKQAIVDLLFKTNRKVTVKQLKENYFKKIECWDSVEITGVEDSFNASLGTYHDLLKIIQDKDFLDNPDNQKIIEDIILTLTLFEDKKMISKRLDQYAHLFDKVVLNKLERHHYTGWGRLSGKLINGIRDKQSGKTILDFLKDGFANRNFMQLIHDSELSFIDEIAKAQVIGKTEYSKDLVGNLASSPAIKKGISQTIKIVDELVKIMGYLPQQIVIEMARENQTTAQGIKNARQRMRKLEETAKKLGSNILKEHPVDNSQLQNDKRYLYYLQNGKDMYTGDDLDIDYLSSYDIDHIIPQSFIKNNSIDNKVLTSQGANRGKLDNVPSEAIVRKMKGYWQSLLRAGAISKQKFDNLTKAERGGLTQVDKAGFIQRQLVETRQITKHVAQILDSRFNTEFDDHNKRIRKVHIITLKSKLVSDFRKEFGLYKIRDINHYHHAHDAYLNAVVAKAILGKYPQLAPEFVYGDYPKYNSFKERQKATQKTLFYSNILKFFKDQESLHVNSDGEEIWNANKHLPIIKNVLSIPQVNIVKKTEVQTGGFYKESILSKGNSDKLIPRKNNWDTRKYGGFDSPTVAYSVLVIAKMEKGKAKVLKPVKEMVGITIMERIAFEENPVVFLEAKGYREIQEHLIIKLPKYSLFELENGRRRLLASSELQKGNELFLPVDYMTFLYLAAHYHELTGSSEDVLRKKYFVERHLHYFDDIIQMINDFAERHILASSNLEKINHTYHNNSDLPINERAENIINVFTFVALGAPAAFKFFDATIDRKRYTSTKEVLNATLIHQSVTGLYETRIDLSQLGEN

SEQ ID NO: 109 - protein, 1345 aa, Streptococcus equi
MKKPYTIALDIGTNSVGWVVVTDDYRVPTKKMKVLGNTERKTIKKNLIGALLFDSGDTAEGTRLKRTARPRYTRRKNRLRFLKEIFTEEMAKVDDGFFQRLEDSFYVLEDKEGNKHPIFANLADEVAYHKKYPTIYHLRKELVDNPQKADLRLIYLAVAHIIKFRGHFLIEGTLSSKNNNLQKSFDHLVDTYNLLFEEQLLTEGINAKELLSAALSKSKRLENLISLIPGQKKTGIFGNIIALSLGLTPNFKANFGLSKDVKLQLAKDTYADDLDSLLAQIGDQYADLFLAAKNLSDAILLSDILTESDEITRAPLSASMVKRYREHHKDLVTLKTLIKDQLPEKYQEIFLDKTKNGYAGYIEGQVSQEEFYKYLKPILARLDGSEPLLLKIDREDFLRKQRTFDNGSIPHQIHLEELHAILRRQEVFYPFLKDNRKKIESLLTFRIPYYVGPLARGHSRFAWVKRKFDGAIRPWNFEEIVDEEASAQIFIEKMTKNDLYLPNEKVLPKHSLLYETFTVYNELTKVKYATEGMTRPQFLSADQKQAIVDLLFKTNRKVTVKQLKENYFKKIECWDSVEITGVEDSFNASLGTYHDLLKIIQDKDFLDNPDNQKIIEDIILTLTLFEDKKMISKRLDQYAHLFDKVVLNKLERHHYTGWGRLSGKLINGIRDKQSGKTILDFLKDGFANRNFMQLIHDSELSFIDEIAKAQVIGKTEYSKDLVGNLAGSPAIKKGISQTIKIVDELVKIMGYLPQQIVIEMARENQTTAQGIKNARQRMRKLEETAKKLGSNILKEHPVDNSQLQNDKRYLYYLQNGKDMYTGDDLDIDYLSSYDIDHIIPQSFIKNNSIDNKVLTSQGANRGKLDNVPSEAIVRKMKGYWQSLLRAGAISKQKFDNLTKAERGGLTQVDKAGFIQLQLVETRQITKHVAQILDSRFNTEFDDHNKRIRKVHIITLKSKLVSDFRKEFGLYKIRDINHYHHAHDAYLNAVVAKAILGKYPQLAPEFVYGDYPKYNSFKERQKATQKTLFYSNILKFFKDQESLHVNSDGEEIWNANKHLPIIKNVLSIPQVNIVKKTEVQTGGFYKESILSKGNSDKLIPRKNNWDTRKYGGFDSPTVAYSVLVIAKMEKGKAKVLKPVKEMVGITIMERIAFEENPVVFLEAKGYREIQEHLIIKLPKYSLFELENGRRRLLASSELQKGNELFLPVDYMTFLYLAAHYHELTGSSEDVLRKKYFVERHLHYFDDIIQMINDFAERHILASSNLEKINHTYHNNSDLPVNERAENIINVFTFVALGAPAAFKFFDATIDRKRYTSTKEVLNATLIHQSVTGLYETRIDLSQLGEN

SEQ ID NO: 110 - protein, 1360 aa, Streptococcus equinus
MEKTYSIGLDIGTNSVGWAVITDDYKVPAKKMKVLGNTDKKYIKKNLLGALLFDSGETAEATRLKRAARRRYTRRKNRLRYLQEIFAKEMAKVDESFFQRLEESFLTDDDKTFDSHPIFGNKAEEDTYHQEFPTIYHLRKHLADSPEKVDLRLVYLALAHMIKFRGHFLIEGQLNAENTDVQKIFADFVGVYDRTFDDSHLSEITVDAASILTEKISKSRRLENLIKQYPTEKKNTLFGNLVALALGLQPNFKTNFKLSEDAKLQFSKDTYDEDLEELLGKIGDDYADLFTAAKNLYDAILLSGILTVDDNSTKAPLSASMIKRYEEHHEDLEKLKTFIKVNNFDKYHEIFKDKSKNGYAGYIENGVKQDIFYKHLKSIISEKNGGQYFLDKIEREDFLRKQRTFDNGSIPYQIHLQEMRTILRRQGEYYPFLKENQAKIEKILTFRIPYYVGPLARKNSRFAWAKYHSDEPITPWNFDEVVDKEKSAEKFITRMTLNDLYLPEEKVLPKHSYVYETFAVYNELTKIKYVNEQGKSFFFDANMKQEIFDHVFKENRKVTKAKLLSYLNNEFEEFRINDLIGLDKDSKSFNASLGTYHDLKKILDKSFLDDKTNEQIIEDIVLTLTLFEDRDMIHERLQKYSDIFTSQQLKKLERRHYTGWGRLSYKLINGIRNKENNKTILDFLIDDGDANRNFMQLINDDSLSFKTTIQEAQVVGDVDDIEAVVHDLPGSPAIKKGILQSVKIVDELVKVMGHNPQNIVIEMARENQITGYGRNRSNQRLKRLQDSLKPSYVDSKVENSHLQNDRLFLYYIQNGKDMYTGEELDIDHLSDYDIDHIIPQAFIKDNSIDNRVLTSSAKNRGKSDDVPSIEIVRNRKSYWYKLYKSGLISKRKFDNLTKAERGGLTETDKAGFIKRQLVETRQITKHVAQILDARFNTKCDENDKVIRDVKVITLKSSLVSQFRKEFKFYKVREINDYHHAHDAYLNAVVGTALLKKYPKLAPEFVYGEYKKYDVSSDNHSELGKATAKYFFYSNLMNFFKTEVKYADGRVFERPDIETNADGEVVWNKQRDFNIVRKVLSYPQVNIVKKVEVQTGGFSKESILPKGDSDKLIPRKTKKLQWETQKYGGFDSPTVAYSVLVVADVEKGKTRKLKTVKELVGISIMERSSFEENPVSFLEKKGYHNVQEDKLIKLPKYSLFEFEGGRRRLLASATELQKGNEVVLPQYMVNLLYHSQHVNNSHKPEHLNYVKQHKDEFKDIFNLIISIARINILKPKVVDNLINEFTEYGQEDISSLSESFINLLKFISFGAPGAFKFLKLDVKQSNLRYKSTTEALSATLIHQSVTGLYETRIDLSKLGEE

SEQ ID NO: 111 - protein, 1353 aa, Streptococcus gallolyticus
MTKKNYSIGLDIGTNSVGWAVITDDYKVPAKKMKVLGNTDKKYIKKNLLGALLFDSGETAEATRLKRTARRRYTRRKNRLRYLQEIFAEEMTKVDESFFYRLDESFLTTDEKDFERHPIFGNKAEEDAYHQKFPTIYHLRNYLADSSEKADLRLVYLALAHMIKYRGHFLIEGKLNAENTDVQKLFTDFVGVYDRTFDDSHLSEITVDVASTLTEKISKSRRLENLIKYYPTEKKNTLFGNLIALALGLQPNFKMNFKLSEDAKLQFSKDTYEEDLEELLGKIGDDYADLFTSAKNLYDAILLSGILTVDDNSTKAPLSASMIKRYVEHHEDLEKLKEFIKANKSELYHDIFKDKNKNGYAGYIENGVKQDEFYKYLKNTLSKIDGSDYFLDKIEREDFLRKQRTFDNGSIPHQIHLQEMHAILRRQGDYYPFLKEKQDRIEKILTFRIPYYVGPLVRKDSRFAWAEYRSDEKITPWNFDKVIDKEKSAEKFITRMTLNDLYLPEEKVLPKHSHVYETYAVYNELTKIKYVNEQGKESFFDSNMKQEIFDHVFKENRKVTKEKLLNYLNKEFPEYRIKDLIGLDKENKSFNASLGTYHDLKKILDKAFLDDKVNEEVIEDIIKTLTLFEDKDMIHERLQKYSDIFTANQLKKLERRHYTGWGRLSYKLINGIRNKENNKTILDYLIDDGSANRNFMQLINDDTLPFKQIIQKSQVVGDVDDIEAVVHDLPGSPAIKKGILQSVKIVDELVKVMGDNPDNIVIEMARENQTTNRGRSQSQQRLKKLQSSLKPSYIEDKVENSHLQNDQLFLYYIQNGKDMYTGDELDIDHLSDYDIDHIIPQAFIKDDSIDNRVLTSSAKNRGKSDDVPSLDIVRARKAEWVRLYKSGLISKRKFDNLTKAERGGLTEADKAGFIKRQLVETRQITKHVAQILDARFNTEHDENDKVIRDVKVITLKSNLVSQFRKDFEFYKVREINDYHHAHDAYLNAVVGTALLKKYPKLASEFVYGEYKKYDISSDKATAKYFFYSNLMNFFKTKVKYADGTVFERPIIETNADGEIAWNKQIDFEKVRKVLSYPQVNIVKKVETQTGGFSKESILPKGDSDKLIPRKTKKVYWDTKKYGGFDSPTVAYSVFVVADVEKGKAKKLKTVKELVGISIMERSFFEENPVEFLENKGYHNIREDKLIKLPKYSLFEFEGGRRRLLASASELQKGNEMVLPGYLVELLYHAHRADNFNSTEYLNYVSEHKKEFEKVLSCVEDFANLYVDVEKNLSKIRAVADSMDNFSIEEISNSFINLLTLTALGAPADFNFLGEKIPRKRYTSTKECLTATLIHQSITGLYETRIDLSKLGEE

SEQ ID NO: 112 - protein, 1354 aa, Streptococcus gallolyticus
MTEKNYSIGLDIGTNSVGWAVITDDYKVPAKKMKVLGNTDKKYIKKNLLGALLFDNGETAEATRLKRTARRRYTRRKNRLRYLQEIFAEEMAKVDESFFYRLDESFLTTDDKDFERHPIFGNKADEIKYHQEFPTIYHLRKHLADSHEKADLRLIYLALAHMIKFRGHFLIEGELNAENTDVQKLFEAFVEVYDRTFDDSNLSEITVDASSILTEKFSKSRRLENLIKHYPTEKKNTLFGNLVALALGLQPNFKTSFKLSEDAKLQFSKDTYEEDLEELIGKIGDEYADLFTSAKNLYDAILLSGILTVADNTTKAPLSASMIKRYNEHQVDLKKLKEFIKNNASDKYDEIFNDKDKNGYAGYIENGVKQDEFYKYLKTTLSKIDGSDYFLDKIEREDFLRKQRTFDNGSIPHQIHLQEMHAILRRQGEHYAFLKENQAKIEKILTFRIPYYVGPLARKNSRFAWAEYHSDEKITPWNFDEIIDKEKSAEKFITRMTLNDLYLPEEKVLPKHSLVYETYTVYNELTKVKYVNEQGKSNFFDANMKQEIFEHVFKENRKVTKDKFLNYLNKEFPEYRIQDLIGLDKENKSFNASLGTYHDLKKILDKSFLDDKTNETIIEDIIQTLTLFEDRDMIRQRLQKYSDIFTPQQLKKLERRHYTGWGRLSYKLINGIRNKENGKSILDYLIDDGYANRNFMQLISDDTLPFKQIIKDAQIIGDIDDVTSVVRELPGSPAIKKGILQSVKIVDELVKVMGHNPDNIVIEMARENQTTNRGRNQSQQRLKKLQDSLKPSYIEGKVENNHLQDDRLFLYYIQNGKDMYTGDELDIDHLSDYDIDHIIPQAFIKDDSIDNRVLTSSAKNRGKSDDVPSLDIVHDRKADWIRLYKSGLISKRKFDNLTKAERGGLTENDKAGFIKRQLVETRQITKHVAQILDSRFNTERDENDKVIRNVKVITLKSNLVSQFRKDFKFYKVREINDYHHAHDAYLNAVVGTALLKKYPKLAPEFVYGEYKKYDISGDKATAKYFFYSNLMNFFKRVIRYSNGKVVVRPVIECSKDTGEIAWNKQTDFEKVRRVLSYPQVNIVKKVETQTGGFSKESILPKGNSDKLIPRKTKKFRWDTPKYGGFDSPNIAYSVFVIADVEKGKAKKLKTVKELVGISIMERSSFEENPVVFLEKKGYQNVQEDNLIKLPKYSLFEFEGGRRRLLASASELQKGNEVVLSRHLVELLYHAHRVNSFNNSEHLKYVSEHKKEFGEVLSCVENFAKSYVDVEKNLGKIRAVADKIDTFSIEDISISFVNLLTLTALGAPADFNFLGEKIPRKRYTSTKECLNATLIHQSITGLYETRIDLSKLGEE

SEQ ID NO: 113 - protein, 1355 aa, Streptococcus gallolyticus; identical to SEQ ID NO: 12

SEQ ID NO: 114 - protein, 1358 aa, Streptococcus infantarius
MEKSYSIGLDIGTNSVGWAVITDDYKVPAKKMKVLGNTDKKYIKKNLLGALLFDSGETAEVTRLKRTARRRYTRRKNRLRYLQEIFAKEMTKVDESFFQRLEESFLTDDDKTFDSHPIFGNKAEEDAYHQKFPTIYHLRKYLADSQEKADLRLVYLALAHMIKYRGHFLIEGELNAENTDVQKLFNVFVETYDKIVDESHLSEIEVDASSILTEKVSKSRRLENLIKQYPTEKKNTLFGNLIALALGLQPNFKTNFKLSEDAKLQFSKDTYEEDLEELLGKVGDDYADLFISAKNLYDAILLSGILTVDDNSTKAPLSASMIKRYVEHHEDLEKLKEFIKINKLKLYHDIFKDKTKNGYAGYIDNGVKQDEFYKYLKTILTKIDDSDYFLDKIERDDFLRKQRTFDNGSIPHQIHLQEMHSILRRQGDYYPFLKENQAKIEKILTFRIPYYVGPLARKDSRFAWANYHSDEPITPWNFDEVVDKEKSAEKFITRMTLNDLYLPEEKVLPKHSHVYETFTVYNELTKIKYVNEQGESFFFDANMKQEIFDHVFKENRKVTKAKLLSYLNNEFEEFRINDLIGLDKDSKSFNASLGTYHDLKKILDKSFLDDKTNGQIIEDIVLTLTLFEDRDMIHERLQKYSDFFTSQQLKKLERRHYTGWGRLSYKLINGIRNKENNKTILDFLIDDGHANRNFMQLINDESLSFKTIIQEAQVVGDVDDIEAVVHDLPGSPAIKKGILQSVKIVDELVKVMGDNPDNIVIEMARENQTTGYGRNKSNQRLKRLQDSLKPSYVDSKVENSHLQNDRLFLYYIQNGKDMYTGEELDIDRLSDYDIDHIIPQAFIKDNSIDNKVLTSSAKNRGKSDDVPSIEIVRNRRSYWYKLYKSGLISKRKFDNLTKAERGGLTEADKAGFIKRQLVETRQITKHVAQILDARFNTKRDENDKVIRDVKVITLKSNLVSQFRKEFKFYKVREINDYHHAHDAYLNAVVGTALLKKYPKLTPEFVYGEYKKYDVSSDDYSEMGKATAKYFFYSNLMNFFKTEVKYADGRVFERPDIETNADGEVVWNKQKDFDIVRKVLSYPQVNIVKKVEAQTGGFSKESILSKGDSDKLIPRKTKKVYWNTKKYGGFDSPTVAYSVLVVADIEKGKAKKLKTVKELVGISIMERSFFEENPVSFLEKKGYHNVQEDKLIKLPKYSLFEFEGGRRRLLASATELQKGNEVMLPAHLVELLYHAHRIDSFNSTEHLKYVSEHKKEFEKVLSCVENFSNLYVDVEKNLSKVRAAAESMTNFSLEEISASFINLLTLTALGAPADFNFLGEKIPRKRYTSTKECLSATLIHQSVTGLYETRIDLSKLGEE

SEQ ID NO: 115 - protein, 1358 aa, Streptococcus iniae
MRKPYSIGLDIGTNSVGWAVITDDYKVPSKKMRIQGTTDRTSIKKNLIGALLFDNGETAEATRLKRTTRRRYTRRKYRIKELQKIFSSEMNELDIAFFPRLSESFLVSDDKEFENHPIFGNLKDEITYHNDYPTIYHLRQTLADSDQKADLRLIYLALAHIIKFRGHFLIEGNLDSENTDVHVLFLNLVNIYNNLFEEDVETASIDAEKILTSKTSKSRRLENLIAEIPNQKRNMLFGNLVSLALGLTPNFKTNFELLEDAKLQISKDSYEEDLDNLLAQIGDQYADLFIAAKKLSDAILLSDIITVKGASTKAPLSASMVQRYEEHQQDLALLKNLVKKQIPEKYKEIFDNKEKNGYAGYIDGKTSQEEFYKYIKPILLKLDGTEKLISKLEREDFLRKQRTFDNGSIPHQIHLNELKAIIRRQEKFYPFLKENQKKIEKLFTFKIPYYVGPLANGQSSFAWLKRQSNESITPWNFEEVVDQEASARAFIERMTNFDTYLPEEKVLPKHSPLYEMFMVYNELTKVKYQTEGMKRPVFLSSEDKEEIVNLLFKKERKVTVKQLKEEYFSKMKCFHTVTILGVEDRFNASLGTYHDLLKIFKDKAFLDDEANQDILEEIVWTLTLFEDQAMIERRLVKYADVFEKSVLKKLKKRHYTGWGRLSQKLINGIKDKQTGKTILGFLKDGVANRNFMQLINDSSLDFAKIIKNEQEKTIKNESLEETIANLAGSPAIKKGILQSIKIVDEIVKIMGQNPDNIVIEMARENQSTMQGIKNSRQRLRKLEEVHKNTGSKILKEYNVSNTQLQSDRLYLYLLQDGKDMYTGKELDYDNLSQYDIDHIIPQSFIKDNSIDNTVLTTQASNRGKSDNVPNIETVNKMKSFWYKQLKSGAISQRKFDHLTKAERGALSDFDKAGFIKRQLVETRQITKHVAQILDSRFNSNLTEDSKSNRNVKIITLKSKMVSDFRKDFGFYKLREVNDYHHAQDAYLNAVVGTALLKKYPKLEAEFVYGDYKHYDLPDSSLGKATTRMFFYSNLMNFFKKEIKLADDTIFTRPQIEVNTETGEIVWDKVKDMQTIRKVMSYPQVNIVMKTEVQTGGFSKESIWPKGDSDKLIARKKSWDPKKYGGFDSPIIAYSVLVVAKIAKGKTQKLKTIKELVGIKIMEQDEFEKDPIAFLEKKGYQDIQTSSIIKLPKYSLFELENGRKRLLASELQKGNELALPNKYVKFLYLASHYTKFTGKEEDREKKRSYVESHLYYFDEIMQIIVEYSNRYILADSNLIKIQNLYKEKDNFSIEEQAINMLNLFTFTDLGAPSAFKFFNGDIDRKRYSSTNEIINSTLIYQSPTGLYETRIDLSKLGGK

SEQ ID NO: 116 - protein, 1263 aa, Streptococcus iniae
  misc_feature (1257)..(1257): Xaa can be any naturally occurring amino acid
MRKPYSIGLDIGTNSVGWAVITDDYKVPSKKMRIQGTTDRTSIKKNLIGALLFDNGETAEATRLKRTTRRRYTRRKYRIKELQKIFSSEMNELDIAFFPRLSESFLVSDDKEFENHPIFGNLKDEITYHNDYPTIYHLRQTLADSDQKADLRLIYLALAHIIKFRGHFLIEGNLDSENTDVHVLFLNLVNIYNNLFEEDVETASIDAEKILTSKTSKSRRLENLIAEIPNQKRNMLFGNLVSLALGLTPNFKTNFELLEDAKLQISKDSYEEDLDNLLAQIGDQYADLFIAAKKLSDAILLSDIITVKGASTKAPLSASMVQRYEEHQQDLALLKNLVKKQIPEKYKEIFDNKEKNGYAGYIDGKTSQEEFYKYIKPILLKLDGTEKLISKLEREDFLRKQRTFDNGSIPHQIHLNELKAIIRRQEKFYPFLKENQKKIEKLFTFKIPYYVGPLANGQSSFAWLKRQSNESITPWNFEEVVDQEASARAFIERMTNFDTYLPEEKVLPKHSPLYEMFMVYNELTKVKYQTEGMKRPVFLSSEDKEEIVNLLFKKERKVTVKQLKEEYFSKMKCFHTVTILGVEDRFNASLGTYHDLLKIFKDKAFLDDEANQDILEEIVWTLTLFEDQAMIERRLVKYADVFEKSVLKKLKKRHYTGWGRLSQKLINGIKDKQTGKTILGFLKDGVANRNFMQLINDSSLDFAKIIKNEQEKTIKNESLEETIANLAGSPAIKKGILQSIKIVDEIVKIMGQNPDNIVIEMARENQSTMQGIKNSRQRLRKLEEVHKNTGSKILKEYNVSNTQLQSDRLYLYLLQDGKDMYTGKELDYDNLSQYDIDHIIPQSFIKDNSIDNTVLTTQASNRGKSDNVPNIETVNKMKSFWYKQLKSGAISQRKFDHLTKAERGALSDFDKAGFIKRQLVETRQITKHVAQILDSRFNSNLTEDSKSNRNVKIITLKSKMVSDFRKDFGFYKLREVNDYHHAQDAYLNAVVGTALLKKYPKLEAEFVYGDYKHYDLPDSSLGKATTRMFFYSNLMNFFKKEIKLADDTIFTRPQIEVNTETGEIVWDKVKDMQTIRKVMSYPQVNIVMKTEVQTGGFSKESIWPKGDSDKLIARKKSWDPKKYGGFDSPIIAYSVLVVAKIAKGKTQKLKTIKELVGIKIMEQDEFEKDPIAFLEKKGYQDIQTSSIIKLPKYSLFELENGRKRLLASELQKGNELALPNKYVKFLYLASHYTKFTGKEEDREKKRSYVESHLYYFXEVKSSF

SEQ ID NO: 117 - protein, 1257 aa, Streptococcus iniae
  misc_feature (1255)..(1255): Xaa can be any naturally occurring amino acid
  misc_feature (1257)..(1257): Xaa can be any naturally occurring amino acid
MRKPYSIGLDIGTNSVGWAVITDDYKVPSKKMRIQGTTDRTSIKKNLIGALLFDNGETAEATRLKRTTRRRYTRRKYRIKELQKIFSSEMNELDIAFFPRLSESFLVSDDKEFENHPIFGNLKDEITYHNDYPTIYHLRQTLADSDQKADLRLIYLALAHIIKFRGHFLIEGNLDSENTDVHVLFLNLVNIYNNLFEEDVETASIDAEKILTSKTSKSRRLENLIAEIPNQKRNMLFGNLVSLALGLTPNFKTNFELLEDAKLQISKDSYEEDLDNLLAQIGDQYADLFIAAKKLSDAILLSDIITVKGASTKAPLSASMVQRYEEHQQDLALLKNLVKKQIPEKYKEIFDNKEKNGYAGYIDGKTSQEEFYKYIKPILLKLDGTEKLISKLEREDFLRKQRTFDNGSIPHQIHLNELKAIIRRQEKFYPFLKENQKKIEKLFTFKIPYYVGPLANGQSSFAWLKRQSNESITPWNFEEVVDQEASARAFIERMTNFDTYLPEEKVLPKHSPLYEMFMVYNELTKVKYQTEGMKRPVFLSSEDKEEIVNLLFKKERKVTVKQLKEEYFSKMKCFHTVTILGVEDRFNASLGTYHDLLKIFKDKAFLDDEANQDILEEIVWTLTLFEDQAMIERRLVKYADVFEKSVLKKLKKRHYTGWGRLSQKLINGIKDKQTGKTILGFLKDGVANRNFMQLINDSSLDFAKIIKNEQEKTIKNESLEETIANLAGSPAIKKGILQSIKIVDEIVKIMGQNPDNIVIEMARENQSTMQGIKNSRQRLRKLEEVHKNTGSKILKEYNVSNTQLQSDRLYLYLLQDGKDMYTGKELDYDNLSQYDIDHIIPQSFIKDNSIDNTVLTTQASNRGKSDNVPNIETVNKMKSFWYKQLKSGAISQRKFDHLTKAERGALSDFDKAGFIKRQLVETRQITKHVAQILDSRFNSNLTEDSKSNRNVKIITLKSKMVSDFRKDFGFYKLREVNDYHHAQDAYLNAVVGTALLKKYPKLEAEFVYGDYKHYDLPDSSLGKATTRMFFYSNLMNFFKKEIKLADDTIFTRPQIEVNTETGEIVWDKVKDMQTIRKVMSYPQVNIVMKTEVQTGGFSKESIWPKGDSDKLIARKKSWDPKKYGGFDSPIIAYSVLVVAKIAKGKTQKLKTIKELVGIKIMEQDEFEKDPIAFLEKKGYQDIQTSSIIKLPKYSLFELENGRKRLLASELQKGNELALPNKYVKFLYLASHYTKFTGKEEDREKKRSYVESHLYXFX

SEQ ID NO: 118 - protein, 199 aa, Streptococcus iniae
MEQDEFEKDPIAFLEKKGYQDIQTSSIIKLPKYSLFELENGRKRLLASKELQKGNELALPNKYVKFLYLASHYTKFTGKEEDREKKRSYVESHLYYFDEIMQIIVEYSNRYILADSNLIKIQNLYKEKDNFSIEEQAINMLNLFTFTDLGAPSAFKFFNGDIDRKRYSSTNEIINSTLIYQSPTGLYETRIDLSKLGGK

SEQ ID NO: 119 - protein, 1271 aa, Streptococcus iniae
MRKPYSIGLDIGTNSVGWAVITDDYKVPSKKMRIQGTTDRTSIKKNLIGALLFDNGETAEATRLKRTTRRRYTRRKYRIKELQKIFSSEMNELDIAFFPRLSESFLVSDDKEFENHPIFGNLKDEITYHNDYPTIYHLRQTLADSDQKADLRLIYLALAHIIKFRGHFLIEGNLDSENTDVHVLFLNLVNIYNNLFEEDVETASIDAEKILTSKTSKSRRLENLIAEIPNQKRNMLFGNLVSLALGLTPNFKTNFELLEDAKLQISKDSYEEDLDNLLAQIGDQYADLFIAAKKLSDAILLSDIITVKGASTKAPLSASMVQRYEEHQQDLALLKNLVKKQIPEKYKEIFDNKEKNGYAGYIDGKTSQEEFYKYIKPILLKLDGTEKLISKLEREDFLRKQRTFDNGSIPHQIHLNELKAIIRRQEKFYPFLKENQKKIEKLFTFKIPYYVGPLANGQSSFAWLKRQSNESITPWNFEEVVDQEASARAFIERMTNFDTYLPEEKVLPKHSPLYEMFMVYNELTKVKYQTEGMKRPVFLSSEDKEEIVNLLFKKERKVTVKQLKEEYFSKMKCFHTVTILGVEDRFNASLGTYHDLLKIFKDKAFLDDEANQDILEEIVWTLTLFEDQAMIERRLVKYADVFEKSVLKKLKKRHYTGWGRLSQKLINGIKDKQTGKTILGFLKDGVANRNFMQLINDSSLDFAKIIKNEQEKTIKNESLEETIANLAGSPAIKKGILQSIKIVDEIVKIMGQNPDNIVIEMARENQSTMQGIKNSRQRLRKLEEVHKNTGSKILKEYNVSNTQLQSDRLYLYLLQDGKDMYTGKELDYDNLSQYDIDHIIPQSFIKDNSIDNTVLTTQASNRGKSDNVPNIETVNKMKSFWYKQLKSGAISQRKFDHLTKAERGALSDFDKAGFIKRQLVETRQITKHVAQILDSRFNSNLTEDSKSNRNVKIITLKSKMVSDFRKDFGFYKLREVNDYHHAQDAYLNAVVGTALLKKYPKLEAEFVYGDYKHYDLPDSSLGKATTRMFFYSNLMNFFKKEIKLADDTIFTRPQIEVNTETGEIVWDKVKDMQTIRKVMSYPQVNIVMKTEVQTGGFSKESIWPKGDSDKLIARKKSWDPKKYGGFDSPIIAYSVLVVAKIAKGKTQKLKTIKELVGIKIMEQDEFEKDPIAFLEKKGYQDIQTSSIIKLPKYSLFELENGRKRLLASELQKGNELALPNKYVKFLYLASHYTKFTGKEEDREKKRSYVESHLYYFDVRLSQVFRVTNVEF

SEQ ID NO: 120 - protein, 1345 aa, Streptococcus intermedius
MKKPYSIGLDIGTNSVGWAVVTDDYKVPAKKMKVLGNTDKSHIKKNLLGALLFDSGNTAEDRRLKRTARRRYTRRRNRILYLQEIFSEEMGKVDDSFFHRLEDSFLVTEDKRGERHPIFGNLEEEVKYHENFPTIYHLRQYLADNPEKTDLRLVYLALAHIIKFRGHFLIEGKFDTRNNDVQRLFQEFLAVYDNTFENSSLQEQNVQVEEILTDKISKSAKKDRVLKLFPNEKSNGRFAEFLKLIVGNQADFKKHFELEEKAPLQFSKDTYEEELEVLLAQIEDNYAELFLSAKKLYDSILLSGILTVTDVSTKAPLSASMIQRYNEHQMDLAQLKQFIRQKLSDKYNEVFSDVSKDGYAGYIDGKTNQEAFYKYLKGLLNKIEGSGYFLDKIEREDFLRKQRTFDNGSIPHQIHLQEMRAIIRRQAEFYPFLADNQDRIEKILTFRIPYYIGPLARGKSDFSWLSRKSADKITPWNFDEIVDKESSAEAFINRMTNYDLYLPNQKVLPRHSLLYEKFTVYNELTKVKYKTEQGKTAFFDANMKQEIFDGVFKVYRKVTKDKLMDFLEKEFDEFRIVDLTGLDKENKAFNASYGTYHDLRKILDKDFLDNSKNEKILEDIVLTLTLFEDREMIRKRLENYSDLLTKEQVKNLERRHYTGWGRLSAELIHGIRNKESRKTILDYLIDDGNSNRNFMQLINDDALSFKEEIAKAQVIGETDNLNQVVSDIAGSPAIKKGILQSLKIVDELVKIMGHQPENIVVEMARENQFTNQGRRNSQQRLKGLTDSIKEFGSQILKEHPVENSQLQNDRLFLYYLQNGRDMYTGEELDIDYLSQYDIDHIIPQAFIKDNSIDNRVLTSSKENRGKSDDVPSKDVVRKMKSYWSKLLSAKLITQRKFDNLTKAERGGLTDDDKAGFIKRQLVETRQITKHVARILDERFNTETDENNKKIRQVKIVTLKSNLVSNFRKEFELYKVREINDYHHAHDAYLNAVIGKALLGVYPQLEPEFVYGDYPHFHGHKENKATAKKFFYSNIMNFFKKDDVRTDKNGEIIWKKDEHISNIKKVLSYPQVNIVKKVEEQTGGFSKESILPKGNSDKLIPRKTKKFYWDTKKYGGFDSPIVAYSILVIANIEKGKSKKLKLVKDLVGITIMERTIFEKNPVAFLERKGYRNVQEENIVKLPKYSLFELENGRRRLLASARELQKGNEIVLPNHLGTMLYHAKNIHKVDEPKHLDYVKKHKDEFKELLDVVSNFSKKNILAESNLEKIEELYAQNNNKDITELASSFINLLTFTAIGAPAAFKFFDNNIDRKRYTSTTEILNATLIHQSITGLYETRIDLSRLGGD

SEQ ID NO: 121 - protein, 1333 aa, Streptococcus massiliensis
MKKPYSIGLDIGTNSVGWAVVMEDYKVPSKKMKVLGNTDKQSIKKNLIGALLFDSGETAVERRLNRTTSRRYDRRRNRIRYLQHIFAEEMNRADENFFHRLKESFFVEEDKTYSKYPIFGTLEEEKNYHKNYPTIYHLRKTLADTPDKMDIRLIYLALAHIIKYRGHFLIEGDLDIENIGIQDSFKSFIEEYNTQFGTKLDSTTKVEAIFTENSSKAKRVETILGLFPDETAAGNLDKFLKLMLGNQADFKKVFDLEEKITLQFSKDSYEEDLELLLSKIDEEYAALFDLAKKVYDAVLLSNILTVKEKNTKAPLSASMIKRYEEHKDDLKAFKRFFRERLPEKYETMFKDLTKPSYAAYVSGAVTEDDFYKFSKGLLIDVEGAEYFLEKIEREDFLRKQRTFDNGAIPNQVHVKELQAIILNQSKYYPFLAENKEKIEKILTFRIPYYVGPLARGNSSFAWLQRKSDEAIRPWNFEQVVDMETSASRFIERMTLHDLYLPDEKVLPRHSLIYEKYTVFNELTKVRFTPEGGKEVYFSKTDKENIFDSLFKRYRKVTKRKLKDFIEKELGYGYIDIDNIKGVEEQFNASYTTYQDLLKIIGDKEFLDNEENKDLLEEIIYILTVFEDRKMIEKRLSELNIPFENKIIKKLARKKYTGWGNLSRKLIDGIRNRETNRTILGHLIDDGFSNRNLMQLINDDGLDFKEIIRKAQTIENIDTNQALVSSLPGSPAIKKGILQSLNIVDEIIAIMGYAPTNIVIEMARENQTTQKGRDNSAQRLKKIEDGIKLGSDLLKQNPIQDNKDLQKEKLFLYYMQNGIDLYTGQPLNCDPDSLAFYDVDHIVPRSYIKNDSFDNKVLTTSKGNRKKLDDVPAKEVVEKMENTWRRLHAAGLISDIKLSYLMKGELTEEDKAGFIRRQLVETRQITKHVARLLDEKLNRKKNENGEKLRTTKIITLKSVFASRFRANFDLYKLRELNHYHHAHDAYLNAVVAQALLKVYPKFERELVYGSYVKESIFSRKATERMRMYNNILKFISKDKKDQETGEIVWDKKEIENIVKKVIYSSPVNIVKKREEQSGALFKQSNMAVGYNNKLIPRKKDWSVDKYGGFIEPAESYSLAIFYTDINGKKPKKKSTIIAISRMEKKDYEKEPERFLAQKGFERVEKTIKLPKYSLFEMEKGRRRLLASSGELQKGNQVLLPEHLIRLLSYAKKVDVLVKSKDDDYDLEEHRAEFAELLDCIKKFNDMYILASSNMSKIEEIYQKNIDAPIEEVARSFVLLNFTMMGAATDFKFFGQIIPRKRYPSTTECLKSTLIHQSVTGLYETRIDLSKLGEN

SEQ ID NO: 122 - protein, 1361 aa, Streptococcus mitis
NNKPYSIGLDIGTNSVGWAVITDDYKVPSKKMKVLGNTDKHFIKKNLLGALLFDEGTTAEDRRLKRTARRRYTRRKNRLRYLQEIFTEEMSKVDISFFHRLDDSFLVPEDKRGSKYPIFATLEEEKEYHKNFPTIYHLRKHLADSKEKADFRLIYLALAHIIKYRGHFLYEESFDIKNNDIQKIFNEFISIYDNTFEGSSLNGQNAQVEAIFTDKISKSAKRERVLKLFPDEKSTGLFSEFLKLIVGNQADFKKHFDLEEKAPLQFSKDTYDEDLENLLVQIGDDFADLFLVAKKLYDAILLSGILTVTDPSTKAPLSASMIDRYENHQKDLAALKQFIKTNLPEKYDEVFSDQSKDGYAGYIDGKTTQEAFYKYIKNLLSKLEGADYFLDKIEREDFLRKQRTFDNGSIPHQIHLQEMNAIIRRQGEHYPFLQENKEKIEKILTFRIPYYVGPLARGNRDFAWLTRNSDQAIRPWNFEEIVDKARSAEDFINKMTNYDLYLPEEKVLPKHSLLYETFAVYNELTKVKFIAEGLRDYQFLDSGQKQQIVTQLFKEKRKVTEKDIIQYLHNVDSYDGIELKGIEKQFNASLSTYHDLLKIIKDKEFMDDSKNEAILENIVHTLTIFEDREMIKQRLAHYASIFDEKVIKALTRRHYTGWGKLSAKLINGIYDKQSKKTILDYLIDDGEINRNFMQLINDDGLSFKEIIQKAQVVGKTNDVKQVVQELPGSPAIKKGILQSIKLVDELVKVMGHAPESIVIEMARENQTTARGKKNSQQRYKRIEDALKNLAHNILKEHPTDNIQLQNDRLFLYYLQNGKDMYTGKSLDINQLSSCDIDHIIPQAFIKDDSLDNRVLTSSKDNRGKSDNVPSLEIVQKRKAFWQQLLDSKLISERKFNNLTKAERGGLDERDKVGFIKRQLVETRQITKHVAQILDARFNTEVTEKDKKDRSVKIITLKSNLVSNFRKEFRLYKVREINDYHHAHDPYLNAVVAKAILKKYPKLEPEFVYGDYQKYDLTKDPKEVEKATEKYFFYSNLLNFFKEEVHYADGTIVKRENIEYSKDTGEIAWNKEKDFATIKKVLSLPQVNIVKKTEEQTGGLFDNNIVSKKKVVDASKLTPIKSGLSPEKYGGYARPTIAYSVLVIADIEKGKAKKLKRIKEMVGITVQDKKKFEANPIAYLEECGYKNINPNLIIKLPKYSLFEFNNGQRRLLASSIELQKGNELIVPYHFTALLYHAQRINKISEPIHKQYVETHQSEFKELLTAIISLSKKYIQKPNVESLLQQAFDQSDKDIYQLSESFISLLKLISFGAPGTFKFLGVEISQSNVRYQSVSSCFNATLIHQSITGLYETRIDLSKLGED

SEQ ID NO: 123 - protein, 1359 aa, Streptococcus mitis; identical to SEQ ID NO: 13

SEQ ID NO: 124 - protein, 1345 aa, Streptococcus mutans
MKKPYSIGLDIGTNSVGWAVVTDDYKVPAKKMKVLGNTDKSHIEKNLLGALLFDSGNTAEDRRLKRTARRRYTRRRNRILYLQEIFSEEMGKVDDSFFHRLEDSFLVTEDKRGERHPIFGNLEEEVKYHENFPTIYHLRQYLADNPEKVDLRLVYLALAHIIKFRGHFLIEGKFDTRNNDVQRLFQEFLAVYDNTFENSSLQEQNVQVEEILTDKISKSAKKDRVLKLFPNEKSNGRFAEFLKLIVGNQADFKKHFELEEKAPLQFSKDTYEEELEVLLAQIGDNYAELFLSAKKLYDSILLSGILTVTDVGTKAPLSASMIQRYNEHQMDLAQLKQFIRQKLSDKYNEVFSDVSKDGYAGYIDGKTNQEAFYKYLKGLLNKIEGSGYFLDKIEREDFLRKQRTFDNGSIPHQIHLQEMRAIIRRQAEFYPFLADNQDRIEKLLTFRIPYYVGPLARGKSDFAWLSRKSADKITPWNFDEIVDKESSAEAFINRMTNYDLYLPNQKVLPKHSLLYEKFTVYNELTKVKYKTEQGKTAFFDANMKQEIFDGVFKVYRKVTKDKLMDFLEKEFDEFRIVDLTGLDKENKVFNASYGTYHDLCKILDKDFLDNSKNEKILEDIVLTLTLFEDREMIRKRLENYSDLLTKEQVKKLERRHYTGWGRLSAELIHGIRNKESRKTILDYLIDDGNSNRNFMQLINDDALSFKEEIAKAQVIGETDNLNQVVSDIAGSPAIKKGILQSLKIVDELVKIMGHQPENIVVEMARENQFTNQGRRNSQQRLKGLTDSIKEFGSQILKEHPVENSQLQNDRLFLYYLQNGRDMYTGEELDIDYLSQYDIDHIIPQAFIKDNSIDNRVLTSSKENRGKSDDVPSKDVVRKMKSYWSKLLSAKLITQRKFDNLTKAERGGLTDDDKAGFIKRQLVETRQITKHVARILDERFNTETDENNKKIRQVKIVTLKSNLVSNFRKEFELYKVREINDYHHAHDAYLNAVIGKALLGVYPQLEPEFVYGDYPHFHGHKENKATAKKFFYSNIMNFFKKDDVRTDKNGEIIWKKDEHISNIKKVLSYPQVNIVKKVEEQTGGFSKESILPKGNSDKLIPRKTKKFYWDTKKYGGFDSPIVAYSILVIADIEKGKSKKLKTVKALVGVTIMEKMTFERDPVAFLERKGYRNVQEENIIKLPKYSLFKLENGRKRLLASARELQKGNEIVLPNHLGTLLYHAKNIHKVDEPKHLDYVDKHKDEFKELLDVVSNFSKKYTLAEGNLEKIKELYAQNNGEDLKELASSFINLLTFTAIGAPATFKFFDKNIDRKRYTSTTEILNATLIHQSITGLYETRIDLNKLGGD

SEQ ID NO: 125 - protein, 1345 aa, Streptococcus mutans
MKKPYSIGLDIGTNSVGWAVVTDDYKVPAKKMKVLGNTDKSHIEKNLLGALLFDSGNTAEDRRLKRTARRRYTRRRNRILYLQEIFSEEMGKVDDSFFHRLEDSFLVTEDKRGERHPIFGNLEEEVKYHENFPTIYHLRQYLADNPEKVDLRLVYLALAHIIKFRGHFLIEGKFDTRNNDVQRLFQEFLAVYDNTFENSSLQEQNVQVEEILTDKISKSAKKDRVLKLFPNEKSNGRFAEFLKLIVGNQADFKKHFELEEKAPLQFSKDTYEEELEVLLAQIGDNYAELFLSAKKLYDSILLSGILTVTDVGTKAPLSASMIQRYNEHQMDLAQLKQFIRQKLSDKYNEVFSDVSKDGYAGYIDGKTNQEAFYKYLKGLLNKIEGSGYFLDKIEREDFLRKQRTFDNGSIPHQIHLQEMRAIIRRQAEFYPFLADNQDRIEKLLTFRIPYYVGPLARGKSDFAWLSRKSADKITPWNFDEIVDKESSAEAFINRMTNYDLYLPNQKVLPKHSLLYEKFTVYNELIKVKYKTEQGKTAFFDANMKQEIFDGVFKVYRKVTKDKLMDFLEKEFDEFRIVDLTGLDKENKVFNASYGTYHDLCKILDKDFLDNSKNEKILEDIVLTLTLFEDREMIRKRLENYSDLLTKEQVKKLERRHYTGWGRLSAELIHGIRNKESRKTILDYLIDDGNSNRNFMQLINDDALSFKEEIAKAQVIGETDNLNQVVSDIAGSPAIKKGILQSLKIVDELVKIMGHQPENIVVEMARENQFTNQGRRNSQQRLKGLTDSIKEFGSQILKEHPVENSQLQNDRLFLYYLQNGRDMYTGEELDIDYLSQYDIDHIIPQAFIKDNSIDNRVLTSSKENRGKSDDVPSKDVVRKMKSYWSKLLSAKLITQRKFDNLTKAERGGLTDDDKAGFIKRQLVETRQITKHVARILDERFNTETDENNKKIRQVKIVTLKSNLVSNFRKEFELYKVREINDYHHAHDAYLNAVIGKALLGVYPQLEPEFVYGDYPHFHGHKENKATAKKFFYSNIMNFFKKDDVRTDKNGEIIWKKDEHISNIKKVLSYPQVNIVKKVEEQTGGFSKESILPKGNSDKLIPRKTKKFYWDTKKYGGFDSPIVAYSILVIADIEKGKSKKLKTVKALVGVTIMEKMTFERDPVAFLERKGYRNVQEENIIKLPKYSLFKLENGRKRLLASARELQKGNEIVLPNHLGTLLYHAKNIHKVDEPKHLDYVDKHKDEFKELLDVVSNFSKKYTLAEGNLEKIKELYAQNNGEDLKELASSFINLLTFTAIGAPATFKFFDKNIDRKRYTSTTEILNATLIHQSITGLYETRIDLNKLGGD

SEQ ID NO: 126 - protein, 1345 aa, Streptococcus mutans
MKKPYSIGLDIGTNSVGWAVVTDDYKVPAKKMKVLGNTDKSHIKKNLLGALLFDSGNTAEDRRLKRTARRRYTRRRNRILYLQEIFSEEMGKVDDSFFHRLDESFLTDDDKNFDSYPIFGNKAEEDAYHQKFPTIYHLRKHLADSTEKADLRLVYLALAHMIKFRGHFLIEGELNAENTDVQKLFADFVGVYDRTFDDSHLSEITVDASSILTEKISKSRRLEKLINNYPKEKKNTLFRNLVALSLGLQPNFKTNFKLSEDAKLQFSKDTYEEDLEELLGKIGDDYADLFTLAKNLYDAILLSGILTADDSSTKAPLSASMIKRYAEHHEDLEKLKEFIKANKPELYHDIFKDETKNGYAGYIENGVKQDEFYKYLKNTLSKIAGSDYFLDKIEREDFLRKQRTFDNGSIPHQIHLQEMHAILRRQGDYYPFLKENQDRIEKILTFRIPYYVGPLARGKSDFAWLSRKSADKITPWNFDEIVDKESSVEAFINRMTNYDLYLPNQKVLPKHSLLYEKFTVYNELTKVKYKTEQGKTAFFDANMKQEIFDGVFKVYRKVTKDKLMDFLEKEFDEFRIVDLTGLDKENKAFNASYGTYHDLRKILDKDFLDNSKNEKILEDIVLTLTLFEDREMIRKRLKNYSDLLTKEQLKKLERRHYTGWGRLSAELIHGIRNKESRKTILDYLIDDGNSNRNFMQLINDDALSFKEEIAKAQVIGETDNLNQVVSDIAGSPAIKKGILQSLKIVDELVKIMGHQPENIVVEMARENQFTNQGRRNSQQRLKGLTDSIKEFGSQILKEHPVENSQLQNDRLFLYYLQNGRDMYTGEELDIDYLSQYDIDHIIPQAFIKDNSIDNRVLTSSKENRGKSDDVPSKDVVRKMKSYWSKLLSAKLITQRKFDNLTKGERGGLTDDDKAGFIKRQLVETRQITKHVARILDERFNTETDENNKKIRQVKIVTLKSNLVSNFRKEFELYKVREINDYHHAHDAYLNAVIGKALLGVYPQLEPEFVYGDYPHFHGHKENKATAKKFFYSNIMNFFKKDDVRTDKNGEIIWKKDEYISNIKKVLSYPQVNIVKKVEEQTGGFSKESILPKGDSDKLIPRKTKKFYWDTKKYGGFDSPIVAYSILVIADIEKGKSKKLKTVKALVGVTIMEKMTFERDPVAFLERKGYRNVQEENIIKLPKYSLFKLENGRKRLLASARELQKGNEIVLPNHLGTLLYHAKNIHKVDEPKHLDYVDKHKDEFKELLDVVSNFSKKYTLAEGNLEKIKELYAQNNGEDLKELASSFINLLTFTAIGAPATFKFFDKNIDRKRYTSTTEILNATLIHQSITGLYETRIDLSKLGGD

SEQ ID NO: 127 - protein, 1345 aa, Streptococcus mutans
MKKPYSIGLDIGTNSVGWAVVTDDYKVPAKKMKVLGNTDKSHIKKNLLGALLFDSGNTAEDRRLKRTARRRYTRRRNRILYLQEIFSEEMGKVDDSFFHRLEDSFLVTEDKRGERHPIFGNLEEEVKYHENFPTIYHLRQYLADNPEKTDLRLVYLALAHIIKFRGHFLIEGKFDTRNNDVQRLFQEFLAVYDNTFENSSLQEQNVQVEEILTDKISKSAKKDRVLKLFPNEKSNGRFAEFLKLIVGNQADFKKHFELEEKAPLQFSKDIYEEELEVLLAQIGDNYAELFLSAKKLYDSILLSGILTVTDVSTKAPLSASMIQRYNEHQMDLAQLKQFIRQKLSDKYNEVFSDVSKDGYAGYIDGKTNQEAFYKYLKGLLNKIEGSGYFLDKIEREDFLRKQRTFDNGSIPHQIHLQEMRAIIRRQAEFYPFLADNQDRIEKILTFRIPYYVGPLARGKSDFAWLSRKSADKITPWNFDEIVDKESSVEAFINRMTNYDLYLPNQKVLPKHSLLYEKFTVYNELTKVKYKTEQGKTAFFDANMKQEIFDGVFKVYRKVTKDKLMDFLEKEFDEFRIVDLTGLDKENKAFNASYGTYHDLRKILDKDFLDNSKNEKILEDIVLTLTLFEDREMIRKRLKNYSDLLTKEQLKKLERRHYTGWGRLSAELIHGIRNKESRKTILDYLIDDGNSNRNFMQLINDDALSFKEEIAKAQVIGETDNLNQVVSDIAGSPAIKKGILQSLKIVDELVKIMGHQPENIVVEMARENQFTNQGRRNSQQRLKGLTDSIKEFGSQILKEHPVENSQLQNDRLFLYYLQNGRDMYTGEELDIDYLSQYDIDHIIPQAFIKDNSIDNRVLTSSKENRGKSDDVPSKDVVRKMKSYWSKLLSAKLITQRKFDNLTKAERGGLTDDDKAGFIKRQLVETRQITKHVARILDERFNTETDENNKKIRQVKIVTLKSNLVSNFRKEFELYKVREINDYHHAHDAYLNAVIGKALLGVYPQLEPEFVYGDYPHFHGHKENKATAKKFFYSNIMNFFKKDDVRTDKNGEIIWKKDEHISNIKKVLSYPQVNIVKKVEEQTGGFSKESILPKGNSDKLIPRKTKKFYWDTKKYGGFDSPIVAYSILVIADIEKGKSKKLKTVKALVGVTIMEKMTFERDPVAFLERKGYRNVQEENIIKLPKYSLFKLENGRKRLLASARELQKGNEIVLPNHLGTLLYHAKNIHKVDEPKHLDYVDKHKDEFKELLDVVSNFSKKYTLAEGNLEKIKELYAQNNGEDLKELASSFINLLTFTAIGAPATFKFFDKNIDRKRYTSTTEILNATLIHQSITGLYETRIDLNKLGGD

SEQ ID NO: 128 - protein, 1345 aa, Streptococcus mutans
MKKPYSIGLDIGTNSVGWAVVTDDYKVPAKKMKVLGNTDKSHIKKNLLGALLFDSGNTAEDRRLKRTARRRYTRRRNRILYLQEIFSEEMGKVDDSFFHRLEDSFLVTEDKRGERHPIFGNLEEEVKYHENFPTIYHLRQYLADNPEKVDLRLVYLALAHIIKFRGHFLIEGKFDTRNNDVQRLFQEFLAVYDNTFENSSLQEQNVQVEEILTDKISKSAKKDRVLKLFPNEKSNGRFAEFLKLIVGNQADFKKHFELEEKAPLQFSKDTYEEELEVLLAQIGDNYAELFLSAKKLYDSILLSGILTVTDVSTKAPLSASMIQRYNEHQMDLAQLKQFIRQKLSDKYNEVFSDVSKDGYAGYIDGKTNQEAFYKYLKGLLNKIEGSGYFLDKIEREDFLRKQRTFDNGSIPHQIHLQEMRAIIRRQAEFYPFLADNQDRIEKILTFRIPYYVGPLARGKSDFAWLSRKSADKITPWNFDEIVDKESSAEAFINRMTNYDLYLPNQKVLPKHSLLYEKFTVYNELTKVKYKTEQGKTAFFDANMKQEIFDGVFKVYRKVTKDKLMDFLEKEFDEFRIVDLTGLDKENKVFNASYGTYHDLCKILDKDFLDNSKNEKILEDIVLTLTLFEDREMIRKRLENYSDLLTKEQVKKLERRHYTGWGRLSAELIHGIRNKESRKTILDYLIDDGNSNRNFMQLINDDALSFKEEIAKAQVIGETDNLNQVVSDIAGSPAIKKGILQSLKIVDELVKIMGHQPENIVVEMARENQFTNQGRQNSQQRLKGLTDSIKEFGSQILKEHPVENSQLQNDRLFLYYLQNGRDMYTGEELDIDYLSQYDIDHIIPQAFIKDNSIDNRVLTSSKENRGKSDDVPSEDVVRKMKSYWSKLLSAKLITQRKFDNLTKAERGGLTDDDKAGFIKRQLVETRQITKHVARILDERFYTETDENNKKIRQVKIVTLKSNLVSNFRKEFELYKVREINDYHHAHDAYLNAVIGKALLGVYPQLEPEFVYGDYPHFHGHKENKATAKKFFYSNIMNFFKKDDVRTDKNGEIIWKKDEHISNIKKVLSYPQVNIVKKVEEQTGGFSKESILPKGNSDKLIPRKTKKFYWDTKKYGGFDSPIVAYSILVIADIEKGKSKKLKTVKALVGVTIMEKMTFERDPVAFLERKGYRNVQEENIIKLPKYSLFKLENGRKRLLASARELQKGNEIVLPNHLGTLLYHAKNIHKVDEPKHLDYVDKHKDEFKELLDVVSNFSKKYTLAEGNLEKIKELYAQNNGEDLKELASSFINLLTFTAIGAPATFKFFDKNIDRKRYTSTTEILNATLIHQSITGLYETRIDLSKLGGD

SEQ ID NO: 129 - protein, 1345 aa, Streptococcus mutans
MKKPYSIGLDIGTNSVGWAVVTDDYKVPAKKMKVLGNTDKSHIKKNLLGALLFDSGNTAEDRRLKRTARRRYTRRRNRILYLQEIFSEEMGKVDDSFFHRLEDSFLVTEDKRGERHPIFGNLEEEVKYHENFPTIYHLRQYLADNPEKVDLRLVYLALAHIIKFRGHFLIEGKFDTRNNDVQRLFQEFLAVYDNTFENSSLQEQNVQVEEILTDKISKSAKKDRVLKLFPNEKSNGRFAEFLKLIVGNQADFKKHFELEEKAPLQFSKDTYEEDLEELLGKIGDDYADLFTLAKNLYDAILLSGILTADDSSTKAPLSASMIQRYNEHQMDLAQLKQFIRQKLSDKYNEVFSDVSKDGYAGYIDGKTNQEAFYKYLKGLLNKIEGSGYFLDKIEREDFLRKQRTFDNGSIPHQIHLQEMRAIIRRQAEFYPFLADNQDRIEKILTFRIPYYVGPLARGKSDFAWLSRKSADKITPWNFDEIVDKESSAEAFINRMTNYDLYLPNQKVLPKHSLLYEKFTVYNELTKVKYKTEQGKTAFFDANMKQEIFDGVFKVYRKVTKDKLMDFLEKEFDEFRIVDLTGLDKENKVFNASYGTYHDLCKILDKDFLDNSKNEKILEDIVLTLTLFEDREMIRKRLENYSDLLTKEQVKKLERRHYTGWGRLSAELIHGIRNKESRKTILDYLIDDGNSNRNFMQLINDDALSFKEEIAKAQVIGETDNLNQVVSDIAGSPAIKKGILQSLKIVDELVKIMGHQPENIVVEMARENQFTNQGRRNSQQRLKGLTDSIKEFGSQILKEHPVENSQLQNDRLFLYYLQNGRDMYTGEELDIDYLSQYDIDHIIPQAFIKDNSIDNRVLTSSKENRGKSDDVPSKDVVRKMKSYWSKLLSAKLITQRKFDNLTKAERGGLTDDDKAGFIKRQLVETRQITKHVARILDERFYTETDENNKKIRQVKIVTLKSNLVSNFRKEFELYKVREINDYHHAHDAYLNAVIGKALLGVYPQLEPEFVYGDYPHFHGHKENKATAKKFFYSNIMNFFKKDDVRTDKNGEIIWKKDEHISNIKKVLSYPQVNIVKKVEEQTGGFSKESILPKGNSDKLIPRKTKKFYWDTKKYGGFDSPIVAYSILVIADIEKGKSKKLKTVKALVGVTIMEKMTFERDPVAFLERKGYRNVQEENIIKLPKYSLFKLENGRKRLLASARELQKGNEIVLPNHLGTLLYHAKNIHKVDEPKHLDYVDKHKDEFKELLDVVSNFSKKYTLAEGNLEKIKELYAQNNGEDLKELASSFINLLTFTAIGAPATFKFFDKNIDRKRYTSTTEILNATLIHQSITGLYETRIDLSKLGGD

SEQ ID NO: 130 - protein, 1345 aa, Streptococcus mutans
MKKPYSIGLDIGTNSVGWAVVTDDYKVPAKKMKVLGNTDKSHIKKNLLGALLFDSGNTAEDRRLKRTARRRYTRRRNRILYLQEIFSEEMGKVDDSFFHRLEDSFLVTEDKRGERHPIFGNLEEEVKYHENFPTIYHLRQYLADNPEKVDLRLVYLALAHIIKFRGHFLIEGKFDTRNNDVQRLFQEFLAVYDNTFENSSLQEQNVQVEEILTDKISKSAKKDRVLKLFPNEKSNGRFAEFLKLIVGNQADFKKHFELEEKAPLQFSKDTYEEDLEELLGKIGDDYADLFTLAKNLYDAILLSGILTADDSSTKAPLSASMIQRYNEHQMDLAQLKQFIRQKLSDKYNEVFSDVSKDGYAGYIDGKTNQEAFYKYLKGLLNKIEGSGYFLDKIEREDFLRKQRTFDNGSIPHQIHLQEMRAIIRRQAEFYPFLADNQDRIEKILTFRIPYYVGPLARGKSDFAWLSRKSADKITPWNFDEIVDKESSAEAFINRMTNYDLYLPNQKVLPKHSLLYEKFTVYNELTKVKYKTEQGKTAFFDANMKQEIFDGVFKVYRKVTKDKLMDFLEKEFDEFRIVDLTGLDKENKVFNASYGTYHDLCKILDKDFLDNSKNEKILEDIVLTLTLFEDREMIRKRLENYSDLLTKEQVKKLERRHYTGWGRLSAELIHGIRNKESRKTILDYLIDDGNSNRNFMQLINDDALSFKEEIAKAQVIGETDNLNQVVSDIAGSPAIKKGILQSLKIVDELVKIMGHQPENIVVEMARENQFTNQGRRNSQQRLKGLTDSIKEFGSQILKEHPVENSQLQNDRLFLYYLQNGRDMYTGEELDIDYLSQYDIDHIIPQAFIKDNSIDNRVLTSSKENRGKSDDVPSKDVVRKMKPYWSKLLSAKLITQRKFDNLTKAERGGLTDDDKAGFIKRQLVETRQITKHVARILDERFNTETDENNKKIRQVKIVTLKSNLVSNFRKEFELYKVREINDYHHAHDAYLNAVIGKALLGVYPQLEPEFVYGDYPHFHGHEENKATAKKFFYSNIMNFFKKDDVRTDKNGEIIWKKDEHISNIKKVLSYPQVNIVKKVEEQTGGFSKESILPKGNSDKLIPRKTKKFYWDTKKYGGFDSPIVAYSILVIADIEKGKSKKLKTVKALVGVTIMEKMTFERDPVAFLERKGYRNVQEENIIKLPKYSLFKLENGRKRLLASARELQKGNEIVLPNHLGTLLYHAKNIHKVDEPKHLDYVDKHKDEFKELLDVVSNFSKKYTLAEGNLEKIKELYAQNNGEDLKELASSFINLLTFTAIGAPATFKFFDKNIDRKRYTSTTEILNATLIHQSITGLYETRIDLSKLGGD

SEQ ID NO: 131 - protein, 1345 aa, Streptococcus mutans
MKKPYSIGLDIGTNSVGWAVVTDDYKVPAKKMKVLGNTDKSHIKKNLLGALLFDSGNTAEDRRLKRTARRRYTRRRNRILYLQEIFSEEMGKVDDSFFHRLEDSFLVTEDKRGERHPIFGNLEEEVKYHENFPTIYHLRQYLADNPEKVDLRLVYLALAHIIKFRGHFLIEGKFDTRNNDVQRLFQEFLAVYDNTFENSSLQEQNVQVEEILTDKISKSAKKDRVLKLFPNEKSNGRFAEFLKLIVGNQADFKKHFELEEKAPLQFSKDTYEEELEVLLAQIGDNYAELFLSAKKLYDSILLSGILTVTDVSTKAPLSASMIQRYNEHQMDLAQLKQFIRQKLSDKYNEVFSDVSKDGYAGYIDGKTNQEAFYKYLKGLLNKIEGSGYFLDKIEREDFLRKQRTFDNGSIPHQIHLQEMRAIIRRQAEFYPFLADNQDRIEKILTFRIPYYVGPLARGKSDFAWLSRKSADKITPWNFDEIVDKESSAEAFINRMTNYDLYLPNQKVLPKHSLLYEKFTVYNELTKVKYKTEQGKTAFFDANMKQEIFDGVFKVYRKVTKDKLMDFLEKEFDEFRIVDLTGLDKENKVFNASYGTYHDLCKILDKDFLDNSKNEKILEDIVLTLTLFEDREMIRKRLENYSDLLTKEQVKKLERRHYTGWGRLSAELIHGIRNKESRKTILDYLIDDGNSNRNFMQLINDDALSFKEEIAKAQVIGETDNLNQVVSDIAGSPAIKKGILQSLKIVDELVKIMGHQPENIVVEMARENQFTKQGRRNSQQRLKGLTDSIKEFGSQILKEHPVENSQLQNDRLFLYYLQNGRDMYTGEELDIDYLSQYDIDHIIPQAFIKDNSIDNRVLTSSKENRGKSDDVPSKDVVRKMKSYWSKLLSAKLITQRKFDNLTKAERGGLTDDDKAGFIKRQLVETRQITKHVARILDERFYTETDENNKKIRQVKIVTLKSNLVSNFRKEFELYKVREINDYHHAHDAYLNAVIGKALLGVYPQLEPEFVYGDYPHFHGHKENKATAKKFFYSNIMNFFKKDDVRTDKNGEIIWKKDEHISNIKKVLSYPQVNIVKKVEEQTGGFSKESILPKGNSDKLIPRKTKKFYWDTKKYGGFDSPIVAYSILVIADIEKGKSKKLKTVKALVGVTIMEKMTFERDPVAFLERKGYRNVQEENIIKLPKYSLFKLENGRKRLLASARELQKGNEIVLPNHLGTLLYHAKNIHKVDEPKHLDYVDKHKDEFKELLDVVSNFSKKYTLAEGNLEKIKELYAQNNGEDLKELASSFINLLTFTAIGAPATFKFFDKNIDRKRYTSTTEILNATLIHQSITGLYETRIDLSKLGGD

SEQ ID NO: 132 - protein, 1345 aa, Streptococcus mutans
MKKPYSIGLDIGTNSVGWAVVTDDYKVPAKKMKVLGNTDKSHIKKNLLGALLFDSGNTAADRRLKRTARRRYTRRRNRILYLQEIFAEEMSKVDDSFFHRLEDSFLVTEDKRGERHPIFGNLEEEVKYHENFPTIYHLRQYLADNPEKVDLRLVYLALAHIIKFRGHFLIEGKFDTRNNDVQRLFQEFLAVYDNTFENSSLQEQNVQVEEILTDKISKSAKKDRVLKLFPNEKSNGRFAEFLKLIVGNQADFKKHFELEEKAPLQFSKDTYEEELEVLLTQIGDNYAELFLSAKKLYDSILLSGILTVTDVSTKAPLSASMIQRYNEHQMDLAQLKQFIRQKLSDKYNEVFSDVSKDGYAGYIDGKTNQEAFYKYLKGLLNKIEGSGYFLDKIEREDFLRKQRTFDNGSIPHQIHLQEMRAIIRRQAEFYPFLADNQDRIEKILTFRIPYYVGPLARGKSDFAWLSRKSADKITPWNFDEIVDKESSAEAFINRMTNYDLYLPNQKVLPKHSLLYEKFTVYNELTKVKYKTEQGKTAFFDANMKQEIFDGVFKVYRKVTKDKLMDFLEKEFDEFRIVDLTGLDKENKAFNASYGTYHDLRKILDKDFLDNSKNEKILEDIVLTLTLFEDREMIRKRLENYSDLLTKEQVKKLERRHYTGWGRLSAELIHGIRNKESRKTLLDYLIDDGNSNRNFMQLINDDALSFKEEIAKAQVIGETDNLNQVVSDIAGSPAIKKGILQSLKIVDELVKIMGHQPENIVVEMARENQFTNQGRRNSQQRLKGLTDSIKEFGSQILKEHPVENSQLQNDRLFLYYLQNGRDMYTGEELDIDYLSQYDIDHIIPQAFIKDNSIDNRVLTSSKENRGKSDDVPSKDVVRKMKPYWSKLLSAKLITQRKFDNLTKAERGGLTDDDKAGFIKRQLVETRQITKHVARILDERFNTETDENNKKIRQVKIVTLKSNLVSNFRKEFELYKVREINDYHHAHDAYLNAVIGKALLGVYPQLEPEFVYGDYPHFHGHEENKATAKKFFYSNIMNFFKKDDVRTDKNGEIIWKKDEHISNIKKVLSYPQVNIVKKVEEQTGGFSKESILPKGNSDKLIPRKTKKFYWDTKKYGGFDSPIVAYSILVIADIEKGKSKKLKTVKALVGVTIMEKMTFERDPVAFLERKGYRNVQEENIIKLPKYSLFKLENGRKRLLASARELQKGNEIVLPNHLGTLLYHAKNIHKVDEPKHLDYVDKHKDEFKELLDVVSNFSKKYTLAEGNLEKIKELYAQNNGEDLKELSSSFINLLTFTAIGAPAAFKFFDKNIDRKRYTSTTEILNATLIHQSITGLYETRIDLSKLGGD

SEQ ID NO: 133 - protein, 1345 aa, Streptococcus mutans
MKKPYSIGLDIGTNSVGWAVVTDDYKVPAKKMKVLGNTDKSHIKKNLLGALLFDSGNTAEDRRLKRTARRRYTRRRNRILYLQEIFSEEMGKVDDSFFHRLEDSFLVTEDKRGERHPIFGNLEEEVKYHENFPTIYHLRQYLADNPEKVDLRLVYLALAHIIKFRGHFLIEGKFDTRNNDVQRLFQEFLAVYDNTFENSSLQEQNVQVEEILTDKISKSAKKDRVLKLFPNEKSNGRFAEFLKLIVGNQADFKKHFELEEKAPLQFSKDTYEEELEVLLAQIGDNYAELFLSAKKLYDSILLSGILTVTDVSTKAPLSASMIQRYNEHQMDLAQLKQFIRQKLSDKYNEVFSDVSKDGYAGYIDGKTNQEAFYKYLKGLLNKIEGSGYFLDKIEREDFLRKQRTFDNGSIPHQIHLQEMRAIIRRQAEFYPFLADNQDRIEKILTFRIPYYVGPLARGKSDFAWLSRKSADKITPWNFDEIVDKESSAEAFINRMTNYDLYLPNQKVLPKHSLLYEKFTVYNELTKVKYKTEQGKTAFFDANMKQEIFDGVFKVYRKVTKDKLMDFLEKEFDEFRIVDLTGLDKENKVFNASYGTYHDLCKILDKDFLDNSKNEKILEDIVLTLTLFEDREMIRKRLENYSDLLTKEQVKKLERRHYTGWGRLSAELIHGIRNKESRKTILDYLIDDGNSNRNFMQLINDDALSFKEEIAKAQVIGETDNLNQVVSDIAGSPAIKKGILQSLKIVDELVKIMGHQPENIVVEMARENQFTKQGRRNSQQRLKGLTDSIKEFGSQILKEHPVENSQLQNDRLFLYYLQNGRDMYTGEELDIDYLSQYDIDHIIPQAFIKDNSIDNRVLTSSKENRGKSDDVPSKDVVRKMKSYWSKLLSAKLITQRKFDNLTKAERGGLTDDDKAGFIKRQLVETRQITKHVARILDERFYTETDENNKKIRQVKIVTLKSNLVSNFRKEFELYKVREINDYHHAHDAYLNAVIGKALLGVYPQLEPEFVYGDYPHFHGHKENKATAKKFFYSNIMNFFKKDDVRTDRNGEIIWKKDEHISNIKKVLSYPQVNIVKKVEEQTGGFSKESILPKGNSDKLIPRKTKKFYWDTKKYGGFDSPIVAYSILVIADIEKGKSKKLKTVKALVGVTIMEKMTFERDPVAFLERKGYRNVQEENIIKLPKYSLFKLENGRKRLLASARELQKGNEIVLPNHLGTLLYHAKNIHKVDEPKHLDYVDKHKDEFKELLDVVSNFSKKYTLAEGNLEKIKELYAQNNGEDLKELASSFINLLTFTAIGAPATFKFFDKNIDRKRYTSTTEILNATLIHQSITGLYETRIDLSKLGGD

SEQ ID NO: 134 - protein, 1336 aa, Streptococcus mutans
MKKSYSIGLDIGTNSVGWAVVTDDYKVPAKKMKVLGNTDKSHIKKNLLGALLFDSGNTAEDRRLKRTARRRYTRRRNRILYLQEIFSEEMGKVDDSFFHRLDESFLTDDDKNFDSHPIFGNKAEEDAYHQKFPTIYHLRKHLADSTEKADLRLVYLALAHMIKFRGHFLIEGELNAENTDVQKLFADFVGVYDRTFDDSHLSEITVDASSILTEKISKSRRLEKLINNYPKEKKNTLFGNLIALSLGLQPNFKTNFKLSEDAKLQFSKDTYEEDLEELLGKIGDDYADLFTLAKNLYDAILLSGILTADDSSTKAPLSASMIKRYAEHHEDLEKLKEFIKANKPELYHDIFKDETKNGYAGYIENGVKQDEFYKYLKNTLSKIAGSDYFLDKIEREDFLRKQRTFDNGSIPHQIHLQEMHAILRRQGDYYPFLKENQDRIEKILTFRIPYYVGPLARKNSRFAWAEYHSDEAVMPWNFDQVIDKESSAQAFIEHMTNNDLYLPNEKVLPKHSPLYEKYTVYNELTKIKYVTEIGEAKFFDANLKQEIFDGLFKHERKVTKKKLRTFLDKNFDEFRIVDIQGLDKETETFNASYATYQDLLKVIKDKVFMDNPENAEILENIVLTLTLFEDREMIKQRLAKYADVFDKKVIDQLARRHYTGWGRLSAKLLNGIRDKQSCKTIMDYLIDDAQSNRNLMQLITDDNLTFKDDIVKAQYVDNSDDLHQVVQSLAGSPAIKKGILQSLKIVDELVKVMGKEPEQIVVEMARENQTTAKGRRNSQQRYKRLKEAIKDLNHKILKEHPTDNQALQNNRLFLYYLQNGRDMYTGESLDINRLSDYDIDHVIPQAFIKDNSIDNRVLTSSKANRGKSDDVPSEDVVNRMRPFWNKLLSSGLISQRKYNNLTKKELTPDDKAGFIKRQLVETRQITKHVARMLDERFNKEFDDNNKRIRRVKIVTLKSNLVSSFRKEFELYKVREINDYHHAHDAYLNAVVVKALLVKYPKLEPEFVYGEYPKYNSYRERKATQKMFFYSNIMNMFKSKVKLADDQIVERPMIEVNDETGEIAWDKTKHITTVKKVLSYPQVNIVKKVEEQTGGLFDPKSPLEKLVPLKKALNPEKYGGYQKPTTAYPILLIVDTKQLIPISVMDKKRFEQNPVKFLKDKGYQQIEKNNFVKLPKYTLVDIGNGIKRLWASSKEVHKGNQLVVSKKSQDLLYHAHHLDNDYSNEYVKNHYQQFDILFNEITSFSKKCKLGKEHIQKIEEAYSKERDSASIEELADGFIKLLGFTQLGATSPFSFLGIKLNQKQYTGKKDYLEATLIHQSITGLYETRIDLNKLGGD

SEQ ID NO: 135 - protein, 1345 aa, Streptococcus mutans
MKKPYSIGLDIGTNSVGWAVVTDDYKVPAKKMKVLGNTDKSHIKKNLLGALLFDSGNTAADRRLKRTARRRYTRRRNRILYLQEIFAEEMSKVDDSFFHRLEDSFLVTEDKRGERHPIFGNLEEEVKYHENFPTIYHLRQYLADNPEKVDLRLVYLALAHIIKFRGHFLIEGKFDTRNNDVQRLFQEFLAVYDNTFENSSLQEQNVQVEEILTDKISKSAKKDRVLKLFPNEKSNGRFAEFLKLIVGNQADFKKHFELEEKAPLQFSKDTYEEELEVLLAQIGDNYAELFLSAKKLYDSILLSGILTVTDVSTKAPLSASMIQRYNEHQMDLAQLKQFIRQKLSDKYNEVFSDVSKDGYAGYIDGKTNQEAFYKYLKGLLNKIEGSGYFLDKIEREDFLRKQRTFDNGSIPHQIHLQEMRAIIRRQAEFYPFLADNQDRIEKILTFRIPYYVGPLARGKSDFAWLSRKSADKITPWNFDEIVDKESSAEAFINRMTNYDLYLPNQKVLPKHSLLYEKFTVYNELTKVKYKTEQGKTAFFDANMKQEIFDGVFKVYRKVTKDKLMDFLEKEFDEFRIVDLTGLDKENKAFNASYGTYHDLRKILDKDFLDNSKNEKILEDIVLTLTLFEDREMIRKRLENYSDLLTKEQVKKLERRHYTGWGRLSAELIHGIRNKESRKTILDYLIDDGNSNRNFMQLINDDALSFKEEIAKAQVIGETDNLNQVVSDIAGSPAIKKGILQSLKIVDELVKIMGHQPENIVVEMARENQFTNQGRRNSQQRLKGLTDSIKEFGSQILKEHPVEHSQLQNDRLFLYYLQNGRDMYTGEELDIDYLSQYDIDHIIPQAFIKDNSIDNRVLTSSKENRGKSDDVPSKNVVRKMKSYWSKLLSAKLITQRKFDNLTKAERGGLTDDDKAGFIKRQLVETRQITKHVARILDERFHTETDENNKKIRQVKIVTLKSNLVSNFRKEFELYKVREINDYHHAHDAYLNAVIGKALLGVYPQLEPEFVYGDYPHFHGHKENKATAKKFFYSNIMNFFKKDDVRTDKNGEIIWKKDEHISNIKKVLSYPQVNIVKKVEEQTGGFSKESILPKGNSDKLIPRKTKKFYWDTKKYGGFDSPIVAYSILVIADIEKGKSKKLKTVKALVGVTIMEKMTFERDPVAFLERKGYRNVQEENIIKLPKYSLFKLENGRKRLLASARELQKGNEIVLPNHLGTLLYHAKNIHKVDEPKHLDYVDKHKDEFKELLDVVSNFSKKYTLAEGNLEKIKELYAQNNGEDLKELASSFINLLTFTAIGAPATFKFFDKNIDRKRYTSTTEILNATLIHQSITGLYETRIDLSKLGGD

SEQ ID NO: 136 - protein, 1345 aa, Streptococcus mutans
MKKPYSIGLDIGTNSVGWAVVTDDYKVPAKKMKVLGNTDKSHIEKNLLGALLFDSGNTAEDRRLKRTARRRYTRRRNRILYLQEIFSEEMGKVDDSFFHRLEDFFLVTEDKRGERHPIFGNLEEEVKYHENFPTIYHLRQYLADNPEKVDLRLVYLALAHIIKFRGHFLIEGKFDTRNNDVQRLFQEFLAVYDNTFENSSLQEQNVQVEEILTDKISKSAKKDRVLKLFPNEKSNGRFAEFLKLIVGNQADFKKHFELEEKAPLQFSKDTYEEELEVLLAQIGDNYAELFLSAKKLYDSILLSGILTADDSSTKAPLSASMIQRYNEHQMDLAQLKQFIRQKLSDKYNEVFSDVSKDGYAGYIDGKTNQEAFYKYLKGLLNKIEGSGYFLDKIEREDFLRKQRTFDNGSIPHQIHLQEMRAIIRRQSEFYPFLADNQDRIEKILTFRIPYYVGPLARGKSDFAWLSRKSADKITPWNFDEIVDKESSAEAFINRMTNYDLYLPNQKVLPKHSLLYEKFTVYNELTKVKYKTEQGETAFFDANMKQEIFDGVFKVYRKVTKDKLMDFLEKEFDEFRIVDLTGLDKENKAFNASYGTYHDLRKILDKDFLDNSKNEKILEDIVLTLTLFEDREMIRKRLKNYSDLLTKEQLKKLERRHYTGWGRLSAELIHGIRNKESRKTILDYLIDDGNSNRNFMQLINDDALSFKEEIAKAQVIGETDNLNQVVSDIAGSPAIKKGILQSLKIVDELVKIMGHQPENIVVEMARENQFTNQGRRNSQQRLKGLTDSIKEFGSQILKEHPVENSQLQNDRLFLYYLQNGRDMYTGEELDIDYLSQYDIDHIIPQAFIKDNSIDNRVLTSSKENRGKSDDVPSKDVVRKMKPYWSKLLSAKLITQRKFDNLTKAERGGLTDDDKAGFIKRQLVETRQITKHVARILDERFNTETDENNKKIRQVKIVTLKSNLVSNFRKEFELYKVREINDYHHAHDAYLNAVIGKALLGVYPQLEPEFVYGDYPHFHGHEENKATAKKFFYSNIMNFFKKDDVRTDKNGEIIWKKDEHISNIKKVLSYPQVNIVKKVEEQTGGFSKESILPKGNSDKLIPRKTKKFYWDTKKYGGFDSPIVAYSILVIADIEKGKSKKLKTVKALVGVTIMEKMTFERDPVAFLERKGYRNVQEENIIKLPKYSLFKLENGRKRLLASARELQKGNEIVLPNHLGTLLYHAKNIHKVDEPKHLDYVDKHKDEFKELLDVVSNFSKKYTLAEGNLEKIKELYAQNNGEDLKELASSFINLLTFTAIGAPATFKFFDKNIDRKRYTSTTEILNATLIHQSITGLYETRIDLSKLGGD

SEQ ID NO: 137 - protein, 1345 aa, Streptococcus mutans
MKKPYSIGLDIGTNSVGWAVVTDDYKVPAKKMKVLGNTDKSHIKKNLLGALLFDSGNTAEDRRLKRTARRRYTRRRNRILYLQEIFSEEMGKVDDSFFHRLDESFLTDDDKNFDSHPIFGNKAEEDAYHQKFPTIYHLRKHLADSTEKADLRLVYLALAHMIKFRGHFLIEGELNAENTDVQKLFADFVGVYDRTFDDSHLSEITVDASSILTEKISKSRRLEKLINNYPKEKKNTLFGNLIALSLGLQPNFKTNFKLSEDAKLQFSKDTYEEELEVLLAQIGDNYAELFLSAKKLYDSILLSGILTVTDVSTKAPLSASMIQRYNEHQMDLAQLKQFIRQKLSDKYNEVFSDVSKDGYAGYIDGKTNQEAFYKYLKGLLNKIEGSGYFLDKIEREDFLRKQRTFDNGSIPHQIHLQEMRAIIRRQAEFYPFLADNQDRIEKILTFRIPYYVGPLARGKSDFAWLSRKSADKITPWNFDEIVDKESSVEAFINRMTNYDLYLPNQKVLPKHSLLYEKFTVYNELTKVKYKTEQGKTAFFDANMKQEIFDGVFKVYRKVTKDKLMDFLEKEFDEFRIVDLTGLDKENKAFNASYGTYHDLRKILDKDFLDNSKNEKILEDIVLTLTLFEDREMIRKRLKNYSDLLTKEQLKKLERRHYTGWGRLSAELIHGIRNKESRKTILDYLIDDGNSNRNFMQLINDDALSFKEEIAKAQVIGETDNLNQVVSDIAGSPAIKKGILQSLKIVDELVKIMGHQPENIVVEMARENQFTNQGRRNSQQRLKGLTDSIKEFGSQILKEHPVENSQLQNDRLFLYYLQNGRDMYTGEELDIDYLSQYDIDHIIPQAFIKDNSIDNRVLTSSKENRGKSDDVPSKDVVRKMKSYWSKLLSAKLITQRKFDNLTKGERGGLTDDDKAGFIKRQLVETRQITKHVARILDERFNTETDENNKKIRQVKIVTLKSNLVSNFRKEFELYKVREINDYHHAHDAYLNAVIGKALLGVYPQLEPEFVYGDYPHFHGHKENKATAKKFFYSNIMNFFKKDDVRTDKNGEIIWKKDEYISNIKKVLSYPQVNIVKKVEEQTGGFSKESILPKGDSDKLIPRKTKKFYWDTKKYGGFDSPIVAYSILVIADIEKGKSKKLKTVKALVGVTIMEKMTFERDPVAFLERKGYRNVQEENIIKLPKYSLFKLENGRKRLLASARELQKGNEIVLPNHLGTLLYHAKNIHKVDEPKHLDYVDKHKDEFKELLDVVSNFSKKYTLAEGNLEKIKELYAQNNGEDLKELASSFINLLTFTAIGAPATFKFFDKNIDRKRYTSTTEILNATLIHQSITGLYETRIDLSKLGGD

SEQ ID NO: 138 - protein, 1345 aa, Streptococcus mutans
MKKPYSIGLDIGTNSVGWAVVTDDYKVPAKKMKVLGNTDKSHIKKNLLGALLFDSGNTAADRRLKRTARRRYTRRRNRILYLQEIFAEEMSKVDDSFFHRLEDSFLVTEDKRGERHPIFGNLEEEVKYHENFPTIYHLRQYLADNPEKVDLRLVYLALAHIIKFRGHFLIEGKFDTRNNDVQRLFQEFLAVYDNTFENSSLQEQNVQVEEILTDKISKSAKKDRVLKLFPNEKSNGRFAEFLKLIVGNQADFKKHFELEEKAPLQFSKDTYEEELEVLLAQIGDNYAELFLSAKKLYDSILLSGILTVTDVSTKAPLSASMIQRYNEHQMDLAQLKQFIRQKLSDKYNEVFSDVSKDGYAGYIDGKTNQEAFYKYLKGLLNKIEGSGYFLDKIEREDFLRKQRTFDNGSIPHQIHLQEMRAIIRRQAEFYPFLADNQDRIEKILTFRIPYYVGPLARGKSDFAWLSRKSADKITPWNFDEIVDKESSAEAFINRMTNYDLYLPNQKVLPKHSLLYEKFTVYNELTKVKYKTEQGKTAFFDANMKQEIFDGVFKVYRKVTKDKLMDFLEKEFDEFRIVDLTGLDKENKVFNASYGTYHDLCKILDKDFLDNSKNEKILEDIVLTLTLFEDREMIRKRLENYSDLLTKEQVKKLERRHYTGWGRLSAELIHGIRNKESRKTILDYLIDDGNSNRNFMQLINDDALSFKEEIAKAQVIGETDNLNQVVSDIAGSPAIKKGILQSLKIVDELVKIMGHQPENIVVEMARENQFTKQGRRNSQQRLKGLTDSIKEFGSQILKEHPVENSQLQNDRLFLYYLQNGRDMYTGEELDIDYLSQYDIDHIIPQAFIKDNSIDNRVLTSSKENRGKSDDVPSKDVVRKMKSYWSKLLSAKLITQRKFDNLTKAERGGLTDDDKAGFIKRQLVETRQITKHVARILDERFYTETDENNKKIRQVKIVTLKSNLVSNFRKEFELYKVREINDYHHAHDAYLNAVIGKALLGVYPQLEPEFVYGDYPHFHGHKENKATAKKFFYSNIMNFFKKDDVRTDKNGEIIWKKDEHISNIKKVLSYPQVNIVKKVEEQTGGFSKESILPKGNSDKLIPRKTKKFYWDTKKYGGFDSPIVAYSILVIADIEKGKSKKLKTVKALVGVTIMEKMTFERDPVAFLERKGYRNVQEENIIKLPKYSLFKLENGRKRLLASARELQKGNEIVLPNHLGTLLYHAKNIHKVDEPKHLDYVDKHKDEFKELLDVVSNFSKKYTLAEGNLEKIKELYAQNNGEDLKELASSFINLLTFTAIGAPATFKFFDKNIDRKRYTSTTEILNATLIHQSITGLYETRIDLSKLGGD

SEQ ID NO: 139 - protein, 1345 aa, Streptococcus mutans
MKKPYSIGLDIGTNSVGWAVVTDDYKVPAKKMKVLGNTDKSHIKKNLLGALLFDSGNTAADRRLKRTARRRYTRRRNRILYLQEIFAEEMSKVDDSFFHRLEDSFLVTEDKRGERHPIFGNLEEEVKYHENFPTIYHLRQYLADNPEKVDLRLVYLALAHIIKFRGHFLIEGKFDTRNNDVQRLFQEFLAVYDNTFENSSLQEQNVQVEEILTDKISKSAKKDRVLKLFPNEKSNGRFAEFLKLIVGNQADFKKHFELEEKAPLQFSKDTYEEELEVLLAQIGDNYAELFLSAKKLYDSILLSGILTVTDVSTKAPLSASMIQRYNEHQMDLAQLKQFIRQKLSDKYNEVFSDVSKDGYAGYIDGKTNQEAFYKYLKGLLNKIEGSGYFLDKIEREDFLRKQRTFDNGSIPHQIHLQEMRAIIRRQAEFYPFLADNQDRIEKILTFRIPYYVGPLARGKSDFAWLSRKSADKITPWNFDEIVDKESSAEAFINRMTNYDLYLPNQKVLPKHSLLYEKFTVYNELTKVKYKTEQGKTAFFDANMKQEIFDGVFKVYRKVTKDKLMDFLEKEFDEFRIVDLTGLDKENKAFNASYGTYHDLRKILDKDFLDNSKNEKILEDIVLTLTLFEDREMIRKRLENYSDLLTKEQVKKLERRHYTGWGRLSAELIHGIRNKESRKTILDYLIDDGNSNRNFMQLINDDALSFKEEIAKAQVIGETDNLNQVVSDIAGSPAIKKGILQSLKIVDELVKIMGHQPENIVVEMARENQFTNQGRRNSQQRLKGLTDSIKEFGSQILKEHPVENSQLQNDRLFLYYLQNGRDMYTGEELDIDYLSQYDIDHIIPQAFIKDNSIDNRVLTSSKENRGKSDDVPSKNVVRKMKSYWSKLLSAKLITQRKFDNLTKAERGGLTDDDKAGFIKRQLVETRQITKHVARILDERFHTETDENNKKIRQVKIVTLKSNLVSNFRKEFELYKVREINDYHHAHDAYLNAVIGKALLGVYPQLEPEFVYGDYPHFHGHKENKATAKKFFYSNIMNFFKKDDVRTDKNGEIIWKKDEHISNIKKVLSYPQVNIVKKVEEQTGGFSKESILPKGNSDKLIPRKTKKFYWDTKKYGGFDSPIVAYSILVIADIEKGKSKKLKTVKALVGVTIMEKMTFERDPVAFLERKGYRNVQEENIIKLPKYSLFKLENGRKRLLASARELQKGNEIVLPNHLGTLLYHAKNIHKVDEPKHLDYVDKHKDEFKELLDVVSNFSKKYTLAEGNLEKIKELYAQNNGEDLKELSSSFINLLTFTAIGAPAAFKFFDKNIDRKRYTSTTEILNATLIHQSITGLYETRIDLSKLGGD

SEQ ID NO: 140 - protein, 1336 aa, Streptococcus mutans
MKKPYSIGLDIGTNSVGWAVVTDDYKVPAKKMKVLGNTDKSHIKKNLLGALLFDSGNTAEDRRLKRTARRRYTRRRNRILYLQEIFAEEMSKVDDSFFHRLDESFLTDDDKNFDSHPIFGNKAEEDAYHQKFPTIYHLRKHLADSTEKADLRLVYLALAHMIKFRGHFLIEGELNAENTDVQKLFADFVGVYDRTFDDSHLSEITVDASSILTEKISKSRRLEKLINNYPKEKKNTLFGNLIALSLGLQPNFKTNFKLSEDAKLQFSKDTYEEDLEELLGKIGDDYADLFTLAKNLYDAILLSGILTADDSSTKAPLSASMIKRYAEHHEDLEKLKEFIKANKPELYHDIFKDETKNGYAGYIENGVKQDEFYKYLKNTLSKITGSDYFLDQIEREDFLRKQRTFDNGSIPHQIHLQEMHAILRRQGDYYPFLKENQDRIEKILTFRIPYYVGPLARKNSRFAWAEYHSDEAVTPWNFDQVIDKESSAQAFIEHMTNNDLYLPNEKVLPKHSPLYEKYTVYNELTKIKYVTEIGEAKFFDANLKQEIFDGLFKHERKVTKKKLRTFLDKNFDEFRIVDIQGLDKETETFNASYATYQDLLKVIKDKVFMDNPENAEILENIVLTLTLFEDREMIKQRLAKYADVFDKKVIDQLARRHYTGWGRLSAKLLNGIRDKQSCKTIMDYLIDDAQSNRNLMQLITDDNLTFKDDIVKAQYVDNSDDLHQVVQSLAGSPAIKKGILQSLKIVDELVKVMGKEPEQIVVEMARENQTTAKGRRNSQQRYKRLKEAIKDLNHKILKEHPTDNQALQNNRLFLYYLQNGRDMYTGESLDINRLSDYDIDHVIPQAFIKDNSIDNRVLTSSKANRGKSDDVPSEDVVNRMRPFWNKLLSSGLISQRKYNNLTKKELTLDDKAGFIKRQLVETRQITKHVARMLDERFNKEFDDNNKRIRRVKIVTLKSNLVSSFRKEFELYKVREINDYHHAHDAYLNAVVVKALLVKYPKLEPEFVYGEYPKYNSYRERKATQKMFFYSNIMNMFKSKVKLADDQIVERPMIEVNDETGEIAWDKTKHITTVKKVLSYPQVNIVKKVEEQTGGLFDPKSPLEKLVPLKKALNPEKYGGYQKPTTAYPILLIVDTKQLIPISVMDKKRFEQNPVKFLKDKGYQQIEKNNFVKLPKYTLVDIGNGIKRLWASSKEVHKGNQLVVSKKSQDLLYHAHHLDNDYSNEYVKNHYQQFDILFNEITSFSKKCKLGKEHIQKIEEAYSKERDFASIEELADGFIKLLGFTQLGATSPFSFLGIKLNQKQYTGKKDYLEATLIHQSITGLYETRIDLSKLGGD

SEQ ID NO: 141 - protein, 1345 aa, Streptococcus mutans
MKKPYSIGLDIGTNSVGWSVVTDDYKVPAKKMKVLGNTDKSHIEKNLLGALLFDSGNTAEDRRLKRTARRRYTRRRNRILYLQEIFSEEMGKVDDSFFHRLEDSFLVTEDKRGERHPIFGNLEEEVKYHENFPTIYHLRQYLADNPEKVDLRLVYLALAHIIKFRGHFLIEGKFDTRNNDVQRLFQEFLAVYDNTFENSSLQEQNVQVEEILTDKISKSAKKDRVLKLFPNEKSNGRFAEFLKLIVGNQADFKKHFELEEKAPLQFSKDTYEEELEVLLAQIGDNYAELFLSAKKLYDSILLSGILTVTDVGTKAPLSASMIQRYNEHQMDLAQLKQFIRQKLSDKYNEVFSDVSKDGYAGYIDGKTNQEAFYKYLKGLLNKIEGSGYFLDKIEREDFLRKQRTFDNGSIPHQIHLQEMRAIIRRQAEFYPFLADNQDRIEKLLTFRIPYYVGPLARGKSDFAWLSRKSADKITPWNFDEIVDKESSAEAFINRMTNYDLYLPNQKVLPKHSLLYEKFTVYNELTKVKYKTEQGKTAFFDANMKQEIFDGVFKVYRKVTKDKLMDFLEKEFDEFRIVDLTGLDKENKVFNASYGTYHDLCKILDKDFLDNSKNEKILEDIVLTLTLFEDREMIRKRLENYSDLLTKEQVKKLERRHYTGWGRLSAELIHGIRNKESRKTILDYLIDDGNSNRNFMQLINDDALSFKEEIAKAQVIGETDNLNQVVSDIAGSPAIKKGILQSLKIVDELVKIMGHQPENIVVEMARENQFTNQGRRNSQQRLKGLTDSIKEFGSQILKEHPVENSQLQNDRLFLYYLQNGRDMYTGEELDIDYLSQYDIDHIIPQAFIKDNSIDNRVLTSSKENRGKSDDVPSKDVVRKMKSYWSKLLSAKLITQRKFDNLTKAERGGLTDDDKAGFIKRQLVETRQITKHVARILDERFNTETDENNKKIRQVKIVTLKSNLVSNFRKEFELYKVREINDYHHAHDAYLNAVIGKALLGVYPQLEPEFVYGDYPHFHGHKENKATAKKFFYSNIMNFFKKDDVRIDKNGEIIWKKDEHISNIKKVLSYPQVNIVKKVEEQTGGFSKESILPKGNSDKLIPRKTKKFYWDTKKYGGFDSPIVAYSILVIADIEKGKSKKLKTVKALVGVTIMEKMTFERDPVAFLERKGYRNVQEENIIKLPKYSLFKLENGRKRLLASARELQKGNEIVLPNHLGTLLYHAKNIHKVDEPKHLDYVDKHKDEFKELLDVVSNFSKKYTLAEGNLEKIKELYAQNNGEDLKELASSFINLLTFTAIGAPATFKFFDKNIDRKRYTSTTEILNATLIHQSITGLYETRIDLSKLGGD

SEQ ID NO: 142 - protein, 1345 aa, Streptococcus mutans
MKKPYSIGLDIGTNSVGWAVVTDDYKVPAKKMKVLGNTDKSHIKKNLLGALLFDSGNTAEDRRLKRTARRRYTRRRNRILYLQEIFSEEMGKVDDSFFHRLEDSFLVTEDKRGERHPIFGNLEEEVKYHENFPTIYHLRQYLADNPEKTDLRLVYLALAHIIKFRGHFLIEGKFDTRNNDVQRLFQEFLAVYDNTFENSSLQEQNVQVEEILTDKISKSAKKDRVLKLFPNEKSNGRFAEFLKLIVGNQADFKKHFELEEKAPLQFSKDIYEEELEVLLAQIGDNYAELFLSAKKLYDSILLSGILTVTDVSTKAPLSASMIQRYNEHQMDLAQLKQFIRQKLSDKYNEVFSDVSKDGYAGYIDGKTNQEAFYKYLKGLLNKIEGSGYFLDKIEREDFLRKQRTFDNGSIPHQIHLQEMRAIIRRQAEFYPFLADNQDRIEKILTFRIPYYVGPLARGKSDFAWLSRKSADKITPWNFDEIVDKESSVEAFINRMTNYDLYLPNQKVLPKHSLLYEKFTVYNELTKVKYKTEQGKTAFFDANMKQEIFDGVFKVYRKVTKDKLMDFLEKEFDEFRIVDLTGLDKENKAFNASYGTYHDLRKILDKDFLDNSKNEKILEDIVLTLTLFEDREMIRKRLKNYSDLLTKEQLKKLERRHYTGWGRLSAELIHGIRNKESRKTILDYLIDDGNSNRNFMQLINDDALSFKEEIAKAQVIGETDNLNQVVSDIAGSPAIKKGILQSLKIVDELVKIMGHQPENIVVEMARENQFTNQGRRNSQQRLKGLTDSIKEFGSQILKEHPVENSQLQNDRLFLYYLQNGRDMYTGEELDIDYLSQYDIDHIIPQAFIKDNSIDNRVLTSSKENRGKSDDVPSKNVVRKMKSYWSKLLSAKLITQRKFDNLTKAERGGLTDDDKAGFIKRQLVETRQITKHVARILDERFHTETDENNKKIRQVKIVTLKSNLVSNFRKEFELYKVREINDYHHAHDAYLNAVIGKALLGVYPQLEPEFVYGDYPHFHGHKENKATAKKFFYSNIMNFFKKDDVRTDKNGEIIWKKDEHISNIKKVLSYPQVNIVKKVEEQTGGFSKESILPKGNSDKLIPRKTKKFYWDTKKYGGFDSPIVAYSILVIADIEKGKSKKLKTVKALVGVTIMEKMTFERDPVAFLERKGYRNVQEENIIKLPKYSLFKLENGRKRLLASARELQKGNEIVLPNHLGTLLYHAKNIHKVDEPKHLDYVDKHKDEFKELLDVVSNFSKKYTLAEGNLEKIKELYAQNNGEDLKELASSFINLLTFTAIGAPATFKFFDKNIDRKRYTSTTEILNATLIHQSITGLYETRIDLSKLGGD

SEQ ID NO: 143 - protein, 1345 aa, Streptococcus mutans
MKKPYSIGLDIGTNSVGWAVVTDDYKVSAKKMKVLGNTDKSHIKKNLLGALLFDSGNTAEDRRLKRTARRRYTRRRNRILYLQEIFAEEMSKVDDSFFHRLEDSFLVTEDKRGERHPIFGNLEEEVKYHENFPTIYHLRQYLADNPEKVDLRLVYLALAHIIKFRGHFLIEGKFDTRNNDVQRLFQEFLAVYDNTFENSSLQEQNVQVEEILTDKISKSAKKDRVLKLFPNEKSNGRFAEFLKLIVGNQADFKKHFELEEKAPLQFSKDTYEEELEVLLAQIGDNYAELFLSAKKLYDSILLSGILTVTDVSTKAPLSASMIQRYNEHQMDLAQLKQFIRQKLSDKYNEVFSDVSKDGYAGYIDGKTNQEAFYKYLKGLLNKIEGSGYFLDKIEREDFLRKQRTFDNGSIPHQIHLQEMRAIIRRQAEFYPFLADNQDRIEKILTFRIPYYVGPLARGKSDFAWLSRKSADKITPWNFDEIVDKESSAEAFINRMTNYDLYLPNQKVLPKHSLLYEKFTVYNELTKVKYKTEQGKTAFFDANMKQEIFDGVFKVYRKVTKDKLMDFLEKEFDEFRIVDLTGLDKENKAFNASYGTYHDLRKILDKDFLDNSKNEKILEDIVLTLTLFEDREMIRKRLENYSDLLTKEQVKKLERRHYTGWGRLSAELIHGIRNKESRKTILDYLIDDGNSNRNFMQLINDDALSFKEEIAKAQVIGETDNLNQVVSDIAGSPAIKKGILQSLKIVDELVKIMGHQPENIVVEMARENQFTNQGRRNSQQRLKGLTDSIKEFGSQILKEHPVEHSQLQNDRLFLYYLQNGRDMYTGEELDIDYLSQYDIDHIIPQAFIKDNSIDNRVLTSSKENRGKSDDVPSKNVVRKMKSYWSKLLSAKLITQRKFDNLTKAERGGLTDDDKAGFIKRQLVETRQITKHVARILDERFHTETDENNKKIRQVKIVTLKSNLVSNFRKEFELYKVREINDYHHTHDAYLNAVIGKALLGVYPQLEPEFVYGDYPHFHGHKENKATAKKFFYSNIMNFFKKDDVRTDKNGEIIWKKDEHISNIKKVLSYPQVNIVKKVEEQTGGFSKESILPKGNSDKLIPRKTKKFYWDTKKYGGFDSPIVAYSILVIADIEKGKSKKLKTVKALVGVTIMEKMTFERDPVAFLERKGYRNVQEENIIKLPKYSLFKLENGRKRLLASARELQKGNEIVLPNHLGTLLYHAKNIHKVDEPKHLDYVDKHKDEFKELLDVVSNFSKKYTLAEGNLEKIKELYAQNNGEDLKELASSFINLLTFTAIGAPATFKFFDKNIDRKRYTSTTEILNATLIHQSITGLYETRIDLSKLGGD

SEQ ID NO: 144 - protein, 1345 aa, Streptococcus mutans
MKKPYSIGLDIGTNSVGWAVVTDDYKVPAKKMKVLGNTDKSHIKKNLLGALLFDSGNTAEDRRLKRTARRRYTRRRNRILYLQEIFSEEMGKVDDSFFHRLEDSFLVTEDKRGERHPIFGNLEEEVKYHENFPTIYHLRQYLADNPEKTDLRLVYLALAHIIKFRGHFLIEGKFDTRNNDVQRLFQEFLAVYDNTFENSSLQEQNVQVEEILTDKISKSAKKDRVLKLFPNEKSNGRFAEFLKLIVGNQADFKKHFELEEKAPLQFSKDIYEEELEVLLAQIGDNYAELFLSAKKLYDSILLSGILTVTDVSTKAPLSASMIQRYNEHQMDLAQLKQFIRQKLSDKYNEVFSDVSKDGYAGYIDGKTNQEAFYKYLKGLLNKIEGSGYFLDKIEREDFLRKQRTFDNGSIPHQIHLQEMRAIIRRQAEFYPFLADNQDRIEKILTFRIPYYVGPLARGKSDFAWLSRKSADKITPWNFDEIVDKESSVEAFINRMTNYDLYLPNQKVLPKHSLLYEKFTVYNELTKVKYKTEQGKTAFFDANMKQEIFDGVFKVYRKVTKDKLMDFLEKEFDEFRIVDLTGLDKENKAFNASYGTYHDLRKILDKDFLDNSKNEKILEDIVLTLTLFEDREMIRKRLKNYSDLLTKEQLKKLERRHYTGWGRLSAELIHGIRNKESRKTILDYLIDDGNSNRNFMQLINDDALSFKEEIAKAQVIGETDNLNQVVSDIAGSPAIKKGILQSLKIVDELVKIMGHQPENIVVEMARENQFTNQGRRNSQQRLKGLTDSIKEFGSQILKEHPVENSQLQNDRLFLYYLQNGRDMYTGEELDIDYLSQYDIDHIIPQAFIKDNSIDNRVLTSSKENRGKSDDVPSKDVVRKMKSYWSKLLSAKLITQRKFDNLTKAERGGLTDDDKAGFIKRQLVETRQITKHVARILDERFNTETDENNKKIRQVKIVTLKSNLVSNFRKEFELYKVREINDYHHAHDAYLNAVIGKALLGVYPQLEPEFVYGDYPHFHGHKENKATAKKFFYSNIMNFFKKDDVRTDKNGEIIWKKDEHISNIKKVLSYPQVNIVKKVEEQTGGFSKESILPKGNSYKLIPRKTKKFYWDTKKYGGFDSPIVAYSILVIADIEKGKSKKLKTVKALVGVTIMEKMTFERDPVAFLERKGYRNVQEENIIKLPKYSLFKLENGRKRLLASARELQKGNEIVLPNHLGTLLYHAKNIHKVDEPKHLDYVDKHKDEFKELLDVVSNFSKKYTLAEGNLEKIKELYAQNNGEDLKELASSFINLLTFTAIGAPAAFKFFDKNIDRKRYTSTTEILNATLIHQSITGLYETRIDLSKLGGD

SEQ ID NO: 145 - protein, 1345 aa, Streptococcus mutans
MKKPYSIGLDIGTNSVGWAVVTDDYKVPAKKMKVLGNTDKSHIKKNLLGALLFDSGNTAEDRRLKRTTRRRYTRRRNRILYLQEIFSEEMGKVDDSFFHRLEDSFLVTEDKRGERHPIFGNLEEEVKYHENFPTIYHLRQYLADNPEKTDLRLVYLALAHIIKFRGHFLIEGKFDTRNNDVQRLFQEFLAVYDNTFENSSLQEQNVQVEEILTDKISKSAKKDRVLKLFPNEKSNGCFAEFLKLIVGNQADFKKHFELEEKAPLQFSKDTYEEELEVLLAQIGDNYAELFLSAKKLYDSILLSGILTVTDVSTKAPLSASMIQRYNEHQMDLTQLKQFIRQKLSDKYNEVFSDVSKDGYAGYIDGKTNQEAFYKYLKGLLNKIEGSGYFLDKIEREDFLRKQRTFDNGSIPHQIHLQEMRAIIRRQAEFYPFLADNQDRIEKLLTFRIPYYVGPLASGKSDFAWLSRKSADKITPWNFDEIVDKESSAEAFINRMTNYDLYLPNQKVLPKHSLLYEKFTVYNELTKVKYKTEQGKTAFFDANMKQEIFDGVFKVYRKVTKDKLMDFLEKEFDEFRIVDLTGLDKENKVFNASYGTYHDLCKILDKDFLDNSKNEKILEDIVLTLTLFEDREMIRKRLENYSDLLTKEQVKKLERRHYTGWGRLSAELIHGIRNKESRKTILDYLIDDGNSNRNFMQLINDDALSFKEEIAKAQVIGETDNLNQVVSDIAGSPAIKKGILQSLKIVDELVKIMGHQPENIVVEMARENQFTNQGRRNSQQRLKGLTDSIKEFGSQILKEHPVENSQLQNDRLFLYYLQNGRDMYTGEELDIDYLSQYDIDHIIPQAFIKDNSIDNRVLTSSKENRGKSDDVPSKDVVRKMKSYWSKLLSAKLITQRKFDNLTKAERGGLTDDDKAGFIKRQLVETRQITKHVARILDERFNTETDENNKKIRQVKIVTLKSNLVSNFRKEFELYKVREINDYHHAHDAYLNAVIGKALLGVYPQLEPEFVYGDYPHFHGHKENKATAKKFFYSNIMNFFKKDDVRTDKNGEIIWKKDEHISNIKKVLSYPQVNIVKKVEEQTGGFSKESILPKGNSDKLIPRKTKKFYWDTKKYGGFDSPIVAYSILVIADIEKGKSKKLKTVKALVGVTIMEKMTFERDPVAFLERKGYRNVQEENIIKLPKYSLFKLENGRKRLLASARELQKGNEIVLPNHLGTLLYHAKNIHKVDEPKHLDYVDKHKDEFKELLDVVSNFSKKYTLAEGNLEKIKELYAQNNGEDLKELASSFINLLTFTAIGAPATFKFFDKNIDRKRYTSTTEILNATLIHQSITGLYETRIDLSKLGGD

SEQ ID NO: 146 - protein, 1345 aa, Streptococcus mutans
MKKPYSIGLDIGTNSVGWAVVTDDYKVPAKKMKVLGNTDKSHIKKNLLGALLFDSGNTAEDRRLKRTARRRYTRRRNRILYLQEIFSEEMGKVDDSFFHRLEDSFLVTEDKRGERHPIFGNLEEEVKYHENFPTIYHLRQYLADNPEKTDLRLVYLALAHIIKFRGHFLIEGKFDTRNNDVQRLFQEFLAVYDNTFENSSLQEQNVQVEEILTDKISKSAKKDRVLKLFPNEKSNGRFAEFLKLIVGNQADFKKHFELEEKAPLQFSKDIYEEELEVLLAQIGDNYAELFLSAKKLYDSILLSGILTVTDVSTKAPLSASMIQRYNEHQMDLAQLKQFIRQKLSDKYNEVFSDVSKDGYAGYIDGKTNQEAFYKYLKGLLNKIEGSGYFLDKIEREDFLRKQRTFDNGSIPHQIHLQEMRAIIRRQAEFYPFLADNQDRIEKILTFRIPYYVGPLARGKSDFAWLSRKSADKITPWNFDEIVDKESSAEAFINRMTNYDLYLPNQKVLPKHSLLYEKFTVYNELTKVKYKTEQGKTAFFDANMKQEIFDGVFKVYRKVTKDKLMDFLEKEFDEFRIVDLTGLDKENKAFNASYGTYHDLRKILDKDFLDNSKNEKILEDIVLTLTLFEDREMIRKRLKNYSDLLTKEQLKKLERRHYTGWGRLSAELIHGIRNKESRKTILDYLIDDGNSNRNFMQLINDDALSFKEEIAKAQVIGETDNLNQVVSDIAGSLAIKKGILQSLKIVDELVKIMGHQPENIVVEMARENQFTNQGRRNSQQRLKGLTDSIKEFGSQILKEHPVENSQLQNDRLFLYYLQNGRDMYTGEELDIDYLSQYDIDHIIPQAFIKDNSIDNRVLTSSKENRGKSDDVPSKDVVRKMKSYWSKLLSAKLITQRKFDNLTKGERGGLTDDDKAGFIKRQLVETRQITKHVARILDERFNTETDENNKKIRQVKIVTLKSNLVSNFRKEFELYKVREINDYHHAHDAYLNAVIGKALLGVYPQLEPEFVYGDYPHFHGHKENKATAKKFFYSNIMNFFKKDDVRTDKNGEIIWKKDEYISNIKKVLSYPQVNIVKKVEEQTGGFFKESILPKGDSDKLIPRKTKKFYWDTKKYGGFDSPIVAYSILVIADIEKGKSKKLKTVKALVGVTIMEKMTFERDPVAFLERKGYRNVQEENIIKLPKYSLFKLENGRKRLLASARELQKGNEIVLPNHLGTLLYHAKNIHKVDEPKHLDYVDKHKDEFKELLDVVSNFSKKYTLAEGNLEKIKELYAQNNGEDLKELASSFINLLTFTAIGAPATFKFFDKNIDRKRYTSTTEILNATLIHQSITGLYETRIDLSKLGGD

SEQ ID NO: 147 - protein, 1345 aa, Streptococcus mutans
MKKPYSIGLDIGTNSVGWAVVTDDYKVPAKKMKVLGNTDKSHIKKNLLGALLFDSGNTAEDRRLKRTARRRYTRRRNRILYLQEIFSEEMGKVNDSFFHRLEDSFLVTEDKRGERHPIFGNLEEEVKYHENFPTIYHLRQYLADNPEKVDLRLVYLALAHIIKFRGHFLIEGKFDTRNNDVQRLFQEFLAVYDNTFENSSLQEQNVQVEEILTDKISKSAKKDRVLKLFPNEKSNGRFAEFLKLIVGNQADFKKHFELEEKAPLQFSKDTYEEELEVLLAQIGDNYAELFLSAKKLYDSILLSGILTVTDVSTKAPLSASMIQRYNEHQMDLAQLKQFIRQKLSDKYNEVFSDVSKDGYAGYIDGKTNQEAFYKYLKGLLNKIEGSGYFLDKIEREDFLRKQRTFDNGSIPHQIHLQEMRAIIRRQAEFYPFLADNQDRIEKILTFRIPYYVGPLARGKSDFAWLSRKSADKITPWNFDEIVDKESSAEAFINRMTNYDLYLPNQKVLPKHSLLYEKFTVYNELTKVKYKTEQGKTAFFDANMKQEIFDGVFKVYRKVTKDKLMDFLEKEFDEFRIVDLTGLDKENKVFNASYGTYHDLCKILDKDFLDNSKNEKILEDIVLTLTLFEDREMIRKRLENYSDLLTKEQVKKLERRHYTGWGRLSAELIHGIRNKESRKTILDYLIDDGNSNRNFMQLINDDALSFKEEIAKAQVIGETDNLNQVVSDIAGSPAIKKGILQSLKIVDELVKIMGHQPENIVVEMARENQFTKQGRRNSQQRLKGLTDSIKEFGSQILKEHPVENSQLQNDRLFLYYLQNGRDMYTGEELDIDYLSQYDIDHIIPQAFIKDNSIDNRVLTSSKENRGKSDDVPSKDVVRKMKSYWSKLLSAKLITQRKFDNLTKAERGGLTDDDKAGFIKRQLVETRQITKHVARILDERFYTETDENNKKIRQVKIVTLKSNLVSNFRKEFELYKVREINDYHHAHDAYLNAVIGKALLGVYPQLEPEFVYGDYPHFHGHKENKATAKKFFYSNIMNFFKKDDVRTDKNGEIIWKKDEYISNIKKVLSYPQVNIVKKVEEQTGGFSKESILPKGNSDKLIPRKTKKFYWDTKKYGGFDSPIVAYSILVIADIEKGKSKKLKTVKALVGVTIMEKMTFERDPIAFLERKGYRNVQEENIIKLPKYSLFKLENGRKRLLASARELQKGNEIVLPNHLGTLLYHAKNIHKVDEPKHLDYVDKHKDEFKELLDVVSNFSKKYTLAEGNLEKIKELYAQNNGEDLKELASSFINLLTFTAIGAPAAFKFFDKNIDRKRYTSTTEILNATLIHQSITGLYETRIDLSKLGGD

SEQ ID NO: 148 - protein, 1345 aa, Streptococcus mutans
MKKPYSIGLDIGTNSVGWAVVTDDYKVPAKKMKVLGNTDKSHIKKNLLGALLFDSGNTAEDRRLKRTARRRYTRRRNRILYLQEIFSEEMGKVDDSFFHRLEDSFLVTEDKRGERHPIFGNLEEEVKYHENFPTIYHLRQYLADNPEKTDLRLVYLALAHIIKFGGHFLIEGKFDTRNNDVQRLFQEFLAVYDNTFENSSLQEQNVQVEEILTDKISKSAKKDRVLKLFPNEKSNGRFAEFLKLIVGNQADFKKHFELEEKAPLQFSKDIYEEELEVLLAQIGDNYAELFLSAKKLYDSILLSGILTVTDVSTKAPLSASMIQRYNEHQMDLAQLKQFIRQKLSDKYNEVFSDVSKDGYAGYIDGKTNQEAFYKYLKGLLNKIEGSGYFLDKIEREDFLRKQRTFDNGSIPHQIHLQEMRAIIRRQAEFYPFLADNQDRIEKILTFRIPYYVGPLARGKSDFAWLSRKSADKITPWNFDEIVDKESSVEAFINRMTNYDLYLPNQKVLPKHSLLYEKFTVYNELTKVKYKTEQGKTAFFDANMKQEIFDGVFKVYRKVTKDKLMDFLEKEFDEFRIVDLTGLDKENKAFNASYGTYHDLRKILDKDFLDNSKNEKILEDIVLTLTLFEDREMIRKRLKNYSDLLTKEQLKKLERRHYTGWGRLSAELIHGIRNKESRKTILDYLIDDGNSNRNFMQLINDDALSFKEEIAKAQVIGETDNLNQVVSDIAGSPAIKKGILQSLKIVDELVKIMGHQPENIVVEMARENQFTNQGRRNSQQRLKGLTDSIKEFGSQILKEHPVENSQLQNDRLFLYYLQNGRDMYTGEELDIDYLSQYDIDHIIPQAFIKDNSIDNRVLTSSKENRGKSDDVPSKNVVRKMKSYWSKLLSAKLITQRKFDNLTKAERGGLTDDDKAGFIKRQLVETRQITKHVARILDERFHTETDENNKKIRQVKIVTLKSNLVSNFRKEFELYKVREINDYHHAHDAYLNAVIGKALLGVYPQLEPEFVYGDYPHFHGHKENKATAKKFFYSNIMNFFKKDDVRTDKNGEIIWKKDEHISNIKKVLSYPQVNIVKKVEEQTGGFSKESILPKGNSDKLIPRKTKKFYWDTKKYGGFDSPIVAYSILVIADIEKGKSKKLKTVKALVGVTIMEKMTFERDPVAFLERKGYRNVQEENIIKLPKYSLFKLENGRKRLLASARELQKGNEIVLPNHLGTLLYHAKNIHKVDEPKHLDYVDKHKDEFKELLDVVSNFSKKYTLAEGNLEKIKELYAQNNGEDLKELASSFINLLTFTAIGAPATFKFFDKNIDRKRYTSTTEILNATLIHQSITGLYETRIDLSKLGGD

SEQ ID NO: 149 - protein, 1345 aa, Streptococcus mutans
MKKPYSIGLDIGTNSVGWAVVTDDYKVPAKKMKVLGNTDKSHIKKNLLGALLFDSGNTAEDRRLKRTARRRYTRRRNRILYLQEIFAEEMMQVDESFFQRLDDSFLVEEDKRGSRYPIFGTLKEEKKYHKEFKTIYHLREKLANSTEKADLRLVYLSLAHMIKFRGHFLIEGQLKAENTNVQALFKDFVEVYDKTVEESHLSEMTVDALSILTEKVSKSRRLENLVECYPTEKKNTLFGNLIALSLGLQPNFKTNFQLSEDAKLQFSKDTYEEDLEGLLGEIGDEYADLFASAKNLYDAILLSGILAVDDNTTKAPLSASMVKRYKEHKEELAAFKRFIKEKLPKKYEEIFKDDTKNGYAGYVGADATEEEFYKYVKGILNKVEGADVWLDKIDREDFLRKQRTFDNGSIPHQIHLQEMHAILRRQGEHYPFLKENQDKIEKILTFRIPYYVGPLVRKGSRFAWAEYKADEKITPWNFDDILDKEKSAEKFITRMTLNDLYLPEEKVLPKHSLLYETFTVYNELTKVKYVNEQGEAKFFDANMKQEIFDHVFKENRKVTKDKLLNYLNKEFEEFRIVNLTGLDKENKVFNSSLGTYHDLRKILNKSFLDNKENEQIIEDIIQTLTLFEDREMIRQRLQKYSDIFTKAQLKKLERRHYTGWGRLSYKLINGIRDKQSNKTILGYLIDDGYSNRNFMQLINDDALSFKEEIAKAQVIGEMDGLNQVVSDIAGSPAIKKGILQSLKIVDELVKVMGHNPANIVIEMARENQTTAKGRRSSQKRYKRLEEAIKDLNHKILKEHPTDNQALQNDRLFLYYLQNGRDMYTEDPLDINRLSDYDIDHIIPQAFIKDNSIDNRVLTRSDKNRGKSDDVPSEEVVHKMKPFWSKLLSAKLITQRKFDNLTKAERGGLTDDDKAGFIKRQLVETRQITKHVARILDERFNTETDENNKKIRQVKIVTLKSNLVSNFRKEFELYKVREINDYHHAHDAYLNAVIGKALLGVYPQLEPEFVYGDYPHFHGHKENKATAKKFFYSNIMNFFKKGDVRTDKNGEIIWKKDEHISNIKKVLSYPQVNIVKKVEEQTGGFSKESILPKGNSDKLIPRKTKKFYWDTKKYGGFDSPIVAYSILVIADIEKGKSKKLKTVKALVGVTIMEKMTFERDPVAFLERKGYRNVQEENIIKLPKYSLFKLENGRKRLLASARELQKGNEIVLPNHLETLLYHAKNIHKVDEPKHLDYVDKHKDEFKELLDVVSNFSKKYTLAEGNLEKIKELYAQNNGEDLKELASSFINLLTFTAIGAPAAFKFFDKNIDRKRYTSTTEILNATLIHQSITGLYETRIDLNKLGGD

SEQ ID NO: 150 - protein, 1345 aa, Streptococcus mutans
MKKPYSIGLDIGTNSVGWAVVTDDYKVPAKKMKVLGNTDKSHIKKNLLGALLFDSGNTAEDRRLKRTARRRYTRRRNRILYLQEIFSEEMDKVDDSFFHRLEDSFLVTEDKRGERHPIFGNLEEEVKYHENFPTIYHLRQYLADNPEKVDLRLVYLALAHIIKFRGHFLIEGKFDTRNNDVQRLFQEFLAVYDNTFENSSLQEQNVQVEEILTDKISKSAKKDRVLKLFPNEKSNGRFAEFLKLIVGNQADFKKHFELEEKAPLQFSKDTYEEELEVLLAQIGDNYAELFLSAKKLYDSILLSGILTVTDVSTKAPLSASMIQRYNEHQMDLAQLKQFIRQKLSDKYNEVFSDVSKDGYAGYIDGKTNQEAFYKYLKGLLNKIEGSGYFLDKIEREDFLRKQRTFDNGSIPHQIHLQEMRAIIRRQAEFYPFLADNQDRIEKILTFRIPYYVGPLARGKSDFAWLSRKSADKITPWNFDEIVDKESSAEAFINRMTNYDLYLPNQKVLPKHSLLYEKFTVYNELTKVKYKTEQGKTAFFDANMKQEIFDGVFKVYRKVTKDKLMDFLEKEFDEFRIVDLTGLDKENKVFNASYGTYHDLCKILDKDFLDNSKNEKILEDIVLTLTLFEDREMIRKRLENYSDLLTKEQVKKLERRHYTGWGRLSAELIHGIRNKESRKTILDYLIDDGNSNRNFMQLINDDALSFKEEIAKAQVIGETDNLNQVVSDIAGSPAIKKGILQSLKIVDELVKIMGHQPENIVVEMARENQFTKQGRRNSQQRLKGLTDSIKEFGSQILKEHPVENSQLQNDRLFLYYLQNGRDMYTGEELDIDYLSQYDIDHIIPQAFIKDNSIDNRVLTSSKENRGKSDDVPSKDVVRKMKSYWSKLLSAKLITQRKFDNLTKAERGGLTDDDKAGFIKRQLVETRQITKHVARILDERFYTETDENNKKIRQVKIVTLKSNLVSNFRKEFELYKVREINDYHHAHDAYLNAVIGKALLGVYPQLEPEFVYGDYPHFHGHKENKATAKKFFYSNIMNFFKKDDVRTDKNGEIIWKKDEHISNIKKVLSYPQVNIVKKVEEQTGGFSKESILPKGNSDKLIPRKTKKFYWDTKKYGGFDSPIVAYSILVIADIEKGKSKKLKTVKALVGVTIMEKMTFERDPVAFLERKGYRNVQEENIIKLPKYSLFKLENGRKRLLASARELQKGNEIVLPNHLGTLLYHAKNIHKVDEPKHLDYVDKHKDEFKELLDVVSNFSKKYTLAEGNLEKIKELYAQNNGEDLKELASSFINLLTFTAIGAPATFKFFDKNIDRKRYTSTTEILNATLIHQSITGLYETRIDLSKLGGD

SEQ ID NO: 151 - protein, 1345 aa, Streptococcus mutans
MKKPYSIGLDIGTNSVGWAVVTDDYKVPAKKMKVLGNTDKSHIKKNLLGALLFDSGNTAEDRRLKRTARRRYTRRRNRILYLQEIFSEEMGKVDDSFFHRLEDSFLVTEDKRGERHPIFGNLEEEVKYHENFPTIYHLRQYLADNPEKVDLRLVYLALAHIIKFRGHFLIEGKFDTRNNDVQKLFQEFLAVYDNTFENSSLQEQNVQVEEILTDKISKSAKKDRVLKLFPNEKSNGRFAEFLKLIVGNQADFKKHFELEEKAPLQLSKDTYEEELEVLLAQIGDNYAELFLSAKKLYDSILLSGILTVTDVSTKAPLSASMIQRYNEHQMDLAQLKQFIRQKLSDKYNEVFSDVSKDGYAGYIDGKTNQEAFYKYLKGLLNKIEGSGYFLDKIEREDFLRKQRTFDNGSIPHQIHLQEMRAIIRRQAEFYPFLADNQDRIEKILTFRIPYYVGPLARGKSDFAWLSRKSADKITPWNFDEIVDKESSVEAFINRMTNYDLYLPNQKVLPKHSLLYEKFTVYNELTKVKYKTEQGKTAFFDANMKQEIFDGVFKVYRKVTKDKLMDFLEKEFDEFRIVDLTGLDKENKAFNASYGTYHDLRKILDKDFLDNSKNEKILEDIVLTLTLFEDREMIRKRLENYSDLLTKEQVKKLERRHYTGWGRLSAELIHGIRNKESRKTLLDYLIDDGNSNRNFMQLINDDALSFKEEIAKAQVIGETDNLNQVVSDIAGSPAIKKGILQSLKIVDELVKIMGHQPENIVVEMARENQFTNQGRRNSQQRLKGLTDSIKEFGSQILKEHPVENSQLQNDRLFLYYLQNGRDMYTGEELDIDYLSQYDIDHIIPQAFIKDNSIDNRVLTSSKENRGKSDDVPSKDVVRKMKSYWSKLLSAKLITQRKFDNLTKAERGGLTDDDKAGFIKRQLVETRQITKHVARILDERFNTETDENNKKIRQVKIVTLKSNLVSNFRKEFELYKVREINDYHHAHDAYLNAVIGKALLGVYPQLEPEFVYGDYPHFHGHKENKATAKKFFYSNIMNFFKKDDVRTDKNGEIIWKKDEYISNIKKVLSYPQVNIVKKVEEQTGGFSKESILPKGNSDKLIPRKTKKFYWDTKKYGGFDSPIVAYSILVIADIEKGKSKKLKTVKALVGVTIMEKMTFERDPIAFLERKGYRNVQEENIIKLPKYSLFKLENGRKRLLASARELQKGNEIVLPNHLGTLLYHAKNIHKVDEPKHLDYVDKHKDEFKELLDVVSNFSKKYTLAEGNLEKIKELYAQNNGEDLKELASSFINLLTFTAIGAPATFKFFDKNIDRKRYTSTTEILNATLIHQSITGLYETRIDLSKLGGD

SEQ ID NO: 152 - protein, 1345 aa, Streptococcus mutans
MKKPYSIGLDIGTNSVGWAVVTDDYKVPAKKMKVLGNTDKSHIKKNLLGALLFDSGNTAEDRRLKRTARRRYTRRRNRILYLQEIFSEEMGKVDDSFFHRLEDSFLVTEDKRGERHPIFGNLEEEVKYHENFPTIYHLRQYLADNPEKTDLRLVYLALAHIIKFRGHFLIEGKFDTRNNDVQRLFQEFLAVYDNTFENSSLQEQNVQVEEILTDKISKSAKKDRVLKLFPNEKSNGRFAEFLKLIVGNQADFKKHFELEEKAPLQFSKDIYEEELEVLLAQIGDNYAELFLSAKKLYDSILLSGILTVTDVSTKAPLSASMIQRYNEHQMDLAQLKQFIRQKLSDKYNEVFSDVSKDGYAGYIDGKTNQEAFYKYLKGLLNKIEGSGYFLDKIEREDFLRKQRTFDNGSIPHQIHLQEMRAIIRRQAEFYPFLADNQDRIEKILTFRIPYYVGPLARGKSDFAWLSRKSADKITPWNFDEIVDKESSAEAFINRMTNYDLYLPNQKVLPKHSLLYEKFTVYNELTKVKYKTEQGKTAFFDANMKQEIFDGVFKVYRKVTKDKLMDFLEKEFDEFRIVDLTGLDKENKAFNASYGTYHDLRKILDKDFLDNSKNEKILEDIVLTLTLFEDREMIRKRLKNYSDLLTKEQLKKLERRHYTGWGRLSAELIHGIRNKESRKTILDYLIDDGNSNRNFMQLINDDALSFKEEIAKAQVIGETDNLNQVVSDIAGSLAIKKGILQSLKIVDELVKIMGHQPENIVVEMARENQFTNQGRRNSQQRLKGLTDSIKEFGSQILKEHPVENSQLQNDRLFLYYLQNGRDMYTGEELDIDYLSQYDIDHIIPQAFIKDNSIDNRVLTSSKENRGKSDDVPSKDVVRKMKSYWSKLLSAKLITQRKFDNLTKGERGGLTDDDKAGFIKHQLVETRQITKHVARILDERFNTETDENNKKIRQVKIVTLKSNLVSNFRKEFELYKVREINDYHHAHDAYLNAVIGKALLGVYPQLEPEFVYGDYPHFHGHKENKATAKKFFYSNIMNFFKKDDVRTDKNGEIIWKKDEYISNIKKVLSYPQVNIVKKVEEQTGGFFKESILPKGDSDKLIPRKTKKFYWDTKKYGGFDSPIVAYSILVIADIEKGKSKKLKTVKALVGVTIMEKMTFERDPVAFLERKGYRNVQEENIIKLPKYSLFKLENGRKRLLASARELQKGNEIVLPNHLGTLLYHAKNIHKVDEPKHLDYVDKHKDEFKELLDVVSNFSKKYTLAEGNLEKIKELYAQNNGEDLKELASSFINLLTFTAIGAPATFKFFDKNIDRKRYTSTTEILNATLIHQSITGLYETRIDLSKLGGD

SEQ ID NO: 153 - protein, 1345 aa, Streptococcus mutans
MKKPYSIGLDIGTNSVGWAVVTDDYKVPAKKMKVLGNTDKSHIKKNLLGALLFDSGNTAEDRRLKRTARRRYTRRRNRILYLQEIFSEEMGKVDDSFFHRLEDSFLVTEDKRGERHPIFGNLEEEVKYHENFPTIYHLRQYLADNPEKTDLRLVYLALAHIIKFRGHFLIEGKFDTRNNDVQRLFQEFLAVYDNTFENSSLQEQNVQVEEILTDKISKSAKKDRVLKLFPNEKSNGRFAEFLKLIVGNQADFKKHFELEEKAPLQFSKDIYEEELEVLLAQIGDNYAELFLSAKKLYDSILLSGILTVTDVSTKAPLSASMIQRYNEHQMDLAQLKQFIRQKLSDKYNEVFSDVSKDGYAGYIDGKTNQEAFYKYLKGLLNKIEGSGYFLDKIEREDFLRKQRTFDNGSIPHQIHLQEMRAIIRRQAEFYPFLADNQDRIEKILTFRIPYYVGPLARGKSDFAWLSRKSADKITPWNFDEIVDKESSAEAFINRMTNYDLYLPNQKVLPKHSLLYEKFTVYNELTKVKYKTEQGKTAFFDANMKQEIFDGVFKVYRKVTKDKLMDFLEKEFDEFRIVDLTGLDKENKAFNASYGTYHDLRKILDKDFLDNSKNEKILEDIVLTLTLFEDREMIRKRLENYSDLLTKEQVKKLERRHYTGWGRLSAELIHGIRNKESRKTLLDYLIDDGNSNRNFMQLINDDALSFKEEIAKAQVIGETDNLNQVVSDIAGSPAIKKGILQSLKIVDELVKIMGHQPENIVVEMARENQFTNQGQRNSQQRLKGLTDSIKEFGSQILKEHPVENSQLQNDRLFLYYLQNGRDMYTGEELDIDYLSQYDIDHIIPQAFIKDNSIDNRVLTSSKENRGKSDDVPSKDVVRKMKSYWSKLLSAKLITQRKFDNLTKAERGGLTDDDKAGFIKRQLVETRQITKHVARILDERFNTETDENNKKIRQVKIVTLKSNLVSNFRKEFELYKVREINDYHHAHDAYLNAVIGKALLGVYPQLEPEFVYGDYPHFHGHKENKATAKKFFYSNIMNFFKKDDVRTDKNGEIIWKKDEYISNIKKVLSYPQVNIVKKVEEQTGGFSKESILPKGDSDKLIPRKTKKFYWDTKKYGGFDSPIVAYSILVIADIEKGKSKKLKTVKALVGVTIMEKMTFERDPVAFLERKGYRNVQEENIIKLPKYSLFKLENGRKRLLASARELQKGNEIVLPDHLGTLLYHAKNIHKVDEPKHLDYVDKHKDEFKELLDVVSNFSKKYTLAEGNLEKIKELYAQNNGEDLKELASSFINLLTFTAIGAPATFKFFDKNIDRKRYTSTTEILNATLIHQSITGLYETRIDLSKLGGD

SEQ ID NO: 154 - protein, 1345 aa, Streptococcus mutans
MKKPYSIGLDIGTNSVGWAVVTDDYKVPAKKMKVLGNTDKSHIKKNLLGALLFDSGNTAADRRLKRTARRRYTRRRNRILYLQEIFAEEMSKVDDSFFHRLEDSFLVTEDKRGERHPIFGNLEEEVKYHENFPTIYHLRQYLADNPEKVDLRLVYLALAHIIKFRGHFLIEGKFDTRNNDVQRLFQEFLAVYDNTFENSSLQEQNVQVEEILTDKISKSAKKDRVLKLFPNEKSNGRFAEFLKLIVGNQADFKKHFELEEKAPLQFSKDTYEEELEVLLAQIGDNYAELFLSAKKLYDSILLSGILTVTDVSTKAPLSASMIQRYNEHQMDLAQLKQFIRQKLSDKYNEVFSDVSKDGYAGYIDGKTNQEAFYKYLKGLLNKIEGSGYFLDKIEREDFLRKQRTFDNGSIPHQIHLQEMRAIIRRQAEFYPFLADNQDRIEKILTFRIPYYVGPLARGKSDFAWLSRKSADKITPWNFDEIVDKESSAEAFINRMTNYDLYLPNQKVLPKHSLLYEKFTVYNELTKVKYKTEQGKTAFFDANMKQEIFDGVFKVYRKVTKDKLMDFLEKEFDEFRIVDLTGLDKENKAFNASYGTYHDLRKILDKDFLDNSKNEKILEDIVLTLTLFEDREMIRKRLENYSDLLTKEQVKKLERRHYTGWGRLSAELIHGIRNKESRKTILDYLIDDGNSNRNFMQLINDDALSFKEEIAKAQVIGETDNLNQVVSDIAGSPAIKKGILQSLKIVDELVKIMGHQPENIVVEMARENQFTNQGRRNSQQRLKGLTDSIKEFGSQILKEHPVKHSQLQNDRLFLYYLQNGRDMYTGEELDIDYLSQYDIDHIIPQAFIKDNSIDNRVLTSSKENRGKSDDVPSKNVVRKMKSYWSKLLSAKLITQRKFDNLTKAERGGLTDDDKAGFIKRQLVETRQITKHVARILDERFHTETDENNKKIRQVKIVTLKSNLVSNFRKEFELYKVREINDYHHAHDAYLNAVIGKALLGVYPQLEPEFVYGDYPHFHGHKENKATAKKFFYSNIMNFFKKDDVRTDKNGEIIWKKDEHISNIKKVLSYPQVNIVKKVEEQTGGFSKESILPKGNSDKLIPRKTKKFYWDTKKYGGFDSPIVAYSILVIADIEKGKSKKLKTVKALVGVTIMEKMTFERDPVAFLERKGYRNVQEENIIKLPKYSLFKLENGRKRLLASARELQKGNEIVLPNHLGTLLYHAKNIHKVDEPKHLDYVDKHKDEFKELLDVVSNFSKKYTLAEGNLEKIKELYAQNNGEDLKELASSFINLLTFTAIGAPATFKFFDKNIDRKRYTSTTEILNATLIHQSITGLYETRIDLSKLGGD

SEQ ID NO: 155 - protein, 1345 aa, Streptococcus mutans
MKKPYSIGLDIGTNSVGWAVVTDDYKVPDKKMKVLGNTDKSHIKKNLLGALLFDSGNTAEDRRLKRTARRRYTRRRNRILYLQEIFSEEMGKVDDSFFHRLEDSFLVTEDKRGERHPIFGNLEEEVKYHENFPTIYHLRQYLADNPEKTDLRLVYLALAHIIKFRGHFLIEGKFDTRNNDVQRLFQEFLAVYDNTFENSSLQEQNVQVEEILTDKISKSAKKDRVLKLFPNEKSNGRFAEFLKLIVGNQADFKKHFELEEKAPLQFSKDIYEEELEVLLAQIGDNYAELFLSAKKLYDSILLSGILTVTDVSTKAPLSASMIQRYNEHQMDLAQLKQFIRQKLSDKYNEVFSDVSKDGYAGYIDGKTNQEAFYKYLKGLLNKIEGSGYFLDKIEREDFLRKQRTFDNGSIPHQIHLQEMRAIIRRQAEFYPFLADNQDRIEKILTFRIPYYVGPLARGKSDFAWLSRKSADKITPWNFDEIVDKESSVEAFINRMTNYDLYLPNQKVLPKHSLLYEKFTVYNELTKVKYKTEQGKTAFFDANMKQEIFDGVFKVYRKVTKDKLMDFLEKEFDEFRIVDLTGLDKENKAFNASYGTYHDLRKILDKDFLDNSKNEKILEDIVLTLTLFEDREMIRKRLKNYSDLLTKEQLKKLERRHYTGWGRLSAELIHGIRNKESRKTILDYLIDDGNSNRNFMQLINDDALSFKEEIAKAQVIGETDNLNQVVSDIAGSPAIKKGILQSLKIVDELVKIMGHQPENIVVEMARENQFTNQGRRNSQQRLKGLTDSIKEFGSQILKEHPVENSQLQNDRLFLYYLQNGRDMYTGEELDIDYLSQYDIDHIIPQAFIKDNSIDNRVLTSSKENRGKSDDVPSKDVVRKMKSYWSKLLSAKLITQRKFDNLTKAERGGLTDDDKAGFIKRQLVETRQITKHVARILDERFYTETDENNKKIRQVKIVTLKSNLVSNFRKEFELYKVREINDYHHAHDAYLNAVIGKALLGVYPQLEPEFVYGDYPHFHGHKENKATAKKFFYSNIMNFFKKDDVRTDKNGEIIWKKDEHISNIKKVLSYPQVNIVKKVEEQTGGFSKESILPKGNSDKLIPRKTKKFYWDTKKYGGFDSPIVAYSILVIADIEKGKSKKLKTVKALVGVTIMEKMTFERDPVAFLERKGYRNVQEENIIKLPKYSLFKLENGRKRLLASARELQKGNEIVLPNHLGTLLYHAKNIHKVDEPKHLDYVDKHKDEFKELLDVVSNFSKKYTLAEGNLEKIKELYAQNNGEDLKELASSFINLLTFTAIGAPATFKFFDKNIDRKRYTSTTEILNATLIHQSITGLYETRIDLSKLGGD

SEQ ID NO: 156 - protein, 1345 aa, Streptococcus mutans
MKKPYSIGLDIGTNSVGWAVVTDDYKVPAKKMKVLGNTDKSHIKKNLLGALLFDSGNTAADRRLKRTARRRYTRRRNRILYLQEIFAEEMSKVDDSFFHRLEDSFLVTEDKRGERHPIFGNLEEEVKYHENFPTIYHLRQYLADNPEKVDLRLVYLALAHIIKFRGHFLIEGKFDTRNNDVQRLFQEFLAVYDNTFENSSLQEQNVQVEEILTDKISKSAKKDRVLKLFPNEKSNGRFAEFLKLIVGNQADFKKHFELEEKAPLQFSKDTYEEELEVLLAQIGDNYAELFLSAKKLYDSILLSGILTVTDVSTKAPLSASMIQRYNEHQMDLAQLKQFIRQKLSDKYNEVFSDVSKDGYAGYIDGKTNQEAFYKYLKGLLNKIEGSGYFLDKIEREDFLRKQRTFDNGSIPHQIHLQEMRAIIRRQAEFYPFLADNQDRIEKILTFRIPYYVGPLARGKSDFAWLSRKSADKITPWNFDEIVDKESSAEAFINRMTNYDLYLPNQKVLPKHSLLYEKFTVYNELTKVKYKTEQGKTAFFDANMKQEIFDGVFKVYRKVTKDKLMDFLEKEFDEFRIVDLTGLDKENKAFNASYGTYHDLRKILDKDFLDNSKNEKILEDIVLTLTLFEDREMIRKRLENYSDLLTKEQVKKLERRHYTGWGRLSAELIHGIRNKESRKTILDYLIDDGNSNRNFMQLINDDALSFKEEIAKAQVIGETDNLNQVVSDIAGSPAIKKGILQSLKIVDELVKIMGHQPENIVVEMARENQFTNQGRRNSQQRLKGLTDSIKEFGSQILKEHPVENSQLQNDRLFLYYLQNGRDMYTGEELDIDYLSQYDIDHIIPQAFIKDNSIDNRVLTSSKENRGKSDDVPSKNVVRKMKSYWSKLLSAKLITQRKFDNLTKAERGGLTDDDKAGFIKRQLVETRQITKHVARILDERFHTETDENNKKIRQVKIVTLKSNLVSNFRKEFELYKVREINDYHHAHDAYLNAVIGKALLGVYPQLEPEFVYGDYPHFHGHKENKATAKKFFYSNIMNFFKKDDVRTDKNGEIIWKKDEHISNIKKVLSYPQVNIVKKVEEQTGGFSKESILPKGNSDKLIPRKTKKFYWDTKKYGGFDSPIVAYSILVIADIEKGKSKKLKTVKALVGVTIMEKMTFERDPVAFLERKGYRNVQEENIIKLPKYSLFKLENGRKRLLASARELQKGNEIVLPNHLGTLLYHAKNIHKVDEPKHLDYVDKHKDEFKELLDVVSNFSKKYTLAEGNLEKIKELYAQNNGEDLKELASSFINLLTFTAIGAPATFKFFDKNIDRKRYTSTTEILNATLIHQSITGLYETRIDLSKLGGD

SEQ ID NO: 157 - protein, 1345 aa, Streptococcus mutans
MKKPYSIGLDIGTNSVGWAVVTDDYKVPAKKMKVLGNTDKSHIEKNLLGALLFDSGNTAEDRRLKRTARRRYTRRRNRILYLQEIFSEEMGKVDDSFFHRLEDSFLVTEDKRGERHPIFGNLEEEVKYHENFPTIYHLRQYLADNPEKVDLRLVYLALAHIIKFRGHFLIEGKFDTRNNDVQRLFQEFLAVYDNTFENSSLQEQNVQVEEILTDKISKSAKKDRVLKLFPNEKSNGRFAEFLKLIIGNQADFKKHFELEEKAPLQFSKDTYEEELEVLLAQIGDNYAELFLSAKKLYDSILLSGILTVTDVGTQAPLSASMIQRYNEHQMDLAQLKQFIRQKLSDKYNEVFSDVSKDGYAGYIDGKTNQEAFYKYLKGLLNKIEGSGYFLDKIEREDFLRKQRTFDNGSIPHQIHLQEMRAIIRRQAEFYPFLADNQDRIEKLLTFRIPYYVGPLARGKSDFAWLSRKSADKITPWNFDEIVDKESSAEAFINRMTNYDLYLPNQKVLPKHSLLYEKFTVYNELTKVKYKTEQGKTAFFDANMKQEIFDGVFKVYRKVTKDKLMDFLEKEFDEFRIVDLTGLDKENKVFNASYGTYHDLCKILDKDFLDNSKNEKILEDIVLTLTLFEDREMIRKRLENYSDLLTKEQVKKLERRHYTGWGRLSAELIHGIRNKESRKTILDYLIDDGNSNRNFMQLINDDALSFKEEIAKAQVIGETDNLNQVVSDIAGSPAIKKGILQSLKIVDELVKIMGHQPENIVVEMARENQFTNQGRRNSQQRLKGLTDSIKEFGSQILKEHPVENSQLQNDRLFLYYLQNGRDMYTGEELDIDYLSQYDIDHIIPQAFIKDNSIDNRVLTSSKENRGKSDDVPSKDVVRKMKSYWSKLLSAKLITQRKFDNLTKAERGGLTDDDKAGFIKRQLVETRQITKHVARILDERFHTETDENNKKIRQVKIVTLKSNLVSNFRKEFELYKVREINDYHHAHDAYLNAVIGKALLGVYPQLEPEFVYGDYPHFHGHKENKATAKKFFYSNIMNFFKKDDVRTDKNGEIIWKKDEHISNIKKVLSYPQVNIVKKVEEQTGGFSKESILPKGNSDKLIPRKTKKFYWDTKKYGGFDSPIVAYSILVIADIEKGKSKKLKTVKALVGVTIMEKMTFERDPVAFLERKGYRNVQEENIIKLPKYSLFKLENGRKRLLASARELQKGNEIVLPNHLGTLLYHAKNIHKVDEPKHLDYVDKHKDEFKELLDVVSNFSKKYTLAEGNLEKIKELYAQNNGEDLKELASSFINLLTFTAIGAPATFKFFDKNIDRKRYTSTTEILNATLIHQSITGLYETRIDLNKLGGD

SEQ ID NO: 158 - protein, 1345 aa, Streptococcus mutans
MKKPYSIGLDIGTNSVGWAVVTDDYKVPAKKMKVLGNTDKSHIKKNLLGALLFDSGNTAEDRRLKRTARRRYTRRRNRILYLQEIFSEEMGKVDDSFFHRLEDSFLVTEDKRGERHPIFGNLEEEVKYHENFPTIYHLRQYLADNPEKVDLRLVYLALAHIIKFRGHFLIEGKFDTRNNDVQKLFQEFLAVYDNTFENSSLQEQNVQVEEILTDKISKSAKKDRVLKLFPNEKSNGRFAEFLKLIVGNQADFKKHFELEEKAPLQLSKDTYEEELEVLLAQIGDNYAELFLSAKKLYDSILLSGILTVTDVSTKAPLSASMIQRYNEHQMDLAQLKQFIRQKLSDKYNEVFSDVSKDGYAGYIDGKTNQEAFYKYLKGLLNKIEGSGYFLDKIEREDFLRKQRTFDNGSIPHQIHLQEMRAIIRRQAEFYPFLADNQDRIEKILTFRIPYYVGPLARGKSDFAWLSRKSADKITPWNFDEIVDKESSVEAFINRMTNYDLYLPNQKVLPKHSLLYEKFTVYNELTKVKYKTEQGKTAFFDANMKQEIFDGVFKVYRKVTKDKLMDFLEKEFDEFRIVDLTGLDKENKAFNASYGTYHDLRKILDKDFLDNSKNEKILEDIVLTLTLFEDREMIRKRLENYSDLLTKEQVKKLERRHYTGWGRLSAELIHGIRNKESRKTLLDYLIDDGNSNRNFMQLINDDALSFKEEIAKAQVIGETDNLNQVVSDIAGSPAIKKGILQSLKIVDELVKIMGHQPENIVVEMARENQFTNQGRRNSQQRLKGLTDSIKEFGSQILKEHPVENSQLQNDRLFLYYLQNGRDMYTGEELDIDYLSQYDIDHIIPQAFIKDNSIDNRVLTSSKENRGKSDDVPSKDVVRKMKSYWSKLLSAKLITQRKFDNLTKAERGGLTDDDKAGFIKRQLVETRQITKHVARILDERFNTETDENNKKIRQVKIVTLKSNLVSNFRKEFELYKVREINDYHHAHDAYLNAVIGKALLGVYPQLEPEFVYGDYPHFHGHKENKATAKKFFYSNIMNFFKKDDVRTDKNGEIIWKKDEYISNIKKVLSYPQVNIVKKVEEQTGGFSKESILPKGNSDKLIPRKTKKFYWDTKKYGGFDSPIVAYSILVIADIEKGKSKKLKTVKALVGVTIMEKMTFERDPIAFLERKGYRNVQEENIIKLPKYSLFKLENGRKRLLASARELQKGNEIVLPNHLGTLLYHAKNIHKVDEPKHLDYVDKHKDEFKELLDVVSNFSKKYTLAEGNLEKIKELYAQNNGEDLKELASSFINLLTFTAIGAPAAFKFFDKNIDRKRYTSTTEILNATLIHQSITGLYETRIDLSKLGGD

SEQ ID NO: 159 - protein, 1345 aa, Streptococcus mutans
MKKPYSIGLDIGTNSVGWAVVTDDYKVPAKKMKVLGNTDKSHIKKNLLGALLFDSGNTAEDRRLKRTARRRYTRRRNRILYLQEIFSEEMGKVDDSFFHRLEDSFLVTEDKRGECHPIFGNLEEEVKYHENFPTIYHLRQYLADNPEKTDLRLVYLALAHIIKFRGHFLIEGKFDTRNNDVQRLFQEFLAVYDNTFENSSLQEQNVQVEEILTDKISKSAKKDRVLKLFPNEKSNGRFAEFLKLIVGNQADFKKHFELEEKAPLQFSKDTYEEELEVLLAQIGDNYAELFLSAKKLYDSILLSGILTVTDVSTKAPLSASMIQRYNEHQMDLTQLKQFIRQKLSDKYNEVFSDVSKDGYAGYIDGKTNQEAFYKYLKGLLNKIEGNGYFLDKIEREDFLRKQRTFDNGSIPHQIHLQEMRAIIRRQAEFYPFLADNQDRIEKILTFRIPYYVGPLARGKSDFAWLSRKSADKITPWNFDEIVDKESSAEAFINRMTNYDLYLPNQKVLPKHSLLYEKFTVYNELTKVKYKTEQGKTAFFDANMKQEIFDGVFKVYRKVTKDKLMDFLEKEFDEFRIVDLTGLDKENKAFNASYGTYHDLRKILDKDFLDNSKNEKILEDIVLTLTLFEDREMIRKRLENYSDLLTKEQVKKLERRHYTGWGRLSAELIHGIRNKESRKTLLDYLIDDGNSNRNFMQLINDDALSFKEEIAKAQVIGETDNLNQVVSDIAGSPAIKKGILQSLKIVDELVKIMGHQPENIVVEMARENQFTNQGRRNSQQRLKGLTDSIKEFGSQILKEHPVENSQLQNDRLFLYYLQNGRDMYTGEELDIDYLSQYDIDHIIPQAFIKDNSIDNRVLTSSKENRGKSDDVPSKDVVRKMKPYWSKLLSAKLITQRKFDNLTKAERGGLTDDDKAGFIKRQLVETRQITKHVARILDERFNTETDENNKKIRQVKIVTLKSNLVSNFRKEFELYKVREINDYHHAHDAYLNAVIGKALLGVYPQLEPEFVYGDYPHFHGHEENKATAKKFFYSNIMNFFKKDDVRTDKNGEIIWKKDEHISNIKKVLSYPQVNIVKKVEEQTGGFSKESILPKGNSDKLIPRKTKKFYWDTKKYGGFDSPIVAYSILVIADIEKGKSKKLKTVKALVGVTIMEKMTFERDPVAFLERKGYRNVQEENIIKLPKYSLFKLENGRKRLLASARELQKGNEIVLPNHLGTLLYHAKNIHKVDEPKHLDYVDKHKDEFKELLDVVSNFSKKYTLAEGNLEKIKELYAQNNGEDLKELSSSFINLLTFTAIGAPAAFKFFDKNIDRKRYTSTTEILNATLIHQSITGLYETRIDLSKLGGD

SEQ ID NO: 160 - protein, 1345 aa, Streptococcus mutans
MKKPYSIGLDIGTNSVGWAVVTDDYKVPAKKMKVLGNTDKSHIEKNLLGALLFDSGNTAEDRRLKRTARRRYTRRRNRILYLQEIFSEEMGKVDDSFFHRLEDSFLVTEDKRGERHPIFGNLEEEVKYHENFPTIYHLRQYLADNPEKVDLRLVYLALAHIIKFRGHFLIEGKFDTRNNDVQRLFQEFLAVYDNTFENSSLQEQNVQVEEILTDKISKSAKKDRVLKLFPNEKSNGRFAEFLKLIVGNQADFKKHFELEEKVPLQFSKDTYEEELEVLLAQIGDNYAELFLSAKKLYDSILLSGILTVTDVGTKAPLSASMIQRYNEHQMDLAQLKQFIRQKLSDKYNEVFSDVSKDGYAGYIDGKTNQEAFYKYLKGLLNKIEGSGYFLDKIEREDFLRKQRTFDNGSIPHQIHLQEMRAIIRRQAEFYPFLADNQDRIEKLLTFRIPYYVGPLARGKSDFAWLSRKSADKITPWNFDEIVDKESSAEAFINRMTNYDLYLPNQKVLPKHSLLYEKFTVYNELTKVKYKTEQGKTAFFDANMKQEIFDGVFKVYRKVTKDKLMDFLEKEFDEFRIVDLTGLDKENKVFNASYGTYHDLCKILDKDFLDNSKNEKILEDIVLTLTLFEDREMIRKRLENYSDLLTKEQVKKLERRHYTGWGRLSAELIHGIRNKESRKTILDYLIDDGNSNRNFMQLINDDALSFKEEIAKAQVIGETDNLNQVVSDIAGSPAIKKGILQSLKIVDELVKIMGHQPENIVVEMARENQFTNQGRRNSQQRLKGLTDSIKEFGSQILKEHPVENSQLQNDRLFLYYLQNGRDMYTGEELDIDYLSQYDIDHIIPQAFIKDNSIDNRVLTSSKENRGKSDDVPSKDVVRKMKSYWSKLLSAKLITQRKFDNLTKAERGGLTDDDKAGFIKRQLVETRQITKHVARILDERFNTETDENNKKIRQVKIVTLKSNLVSNFRKEFELYKVREINDYHHAHDAYLNAVIGKALLGVYPQLEPEFVYGDYPHFHGHKENKATAKKFFYSNIMNFFKKDDVRTDKNGEIIWKKDEHISNIKKVLSYPQVNIVKKVEEQTGGFSKESILPKGNSDKLIPRKTKKFYWDTKKYGGFDSPIVAYSILVIADIEKGKSKKLKTVKALVGVTIMEKMTFERDPVAFLERKGYRNVQEENIIKLPKYSLFKLENGRKRLLASARELQKGNEIVLPNHLGTLLYHAKNIHKVDEPKHLDYVDKHKDEFKELLDVVSNFSKKYTLAEGNLEKIKELYAQNNGEDLKELASSFINLLTFTAIGAPATFKFFDKNIDRKRYTSTTEILNATLIHQSITGLYETRIDLNKLGGD

SEQ ID NO: 161 - protein, 1345 aa, Streptococcus mutans
MKKPYSIGLDIGTNSVGWAVVTDDYKVPAKKMKVLGNTDKSHIKKNLLGALLFDSGNTAEDRRLKRTARRRYTRRRNRILYLQEIFSEEMGKVDDSFFHRLEDSFLVTEDKRGERHPIFGNLEEEVKYHENFPTIYHLRQYLADNPEKTDLRLVYLALAHIIKFRGHFLIEGKFDTRNNDVQRLFQEFLAVYDNTFENSSLQEQNVQVEEILTDKISKSAKKDRVLKLFPNEKSNGRFAEFLKLIVGNQADFKKHFELEEKAPLQFSKDIYEEELEVLLAQIGDNYAELFLSAKKLYDSILLSGILTVTDVSTKAPLSASMIQRYNEHQMDLAQLKQFIRQKLSDKYNEVFSDVSKDGYAGYIDGKTNQEAFYKYLKGLLNKIEGSGYFLDKIEREDFLRKQRTFDNGSIPHQIHLQEMRAIIRRQAEFYPFLADNQDRIEKILTFRIPYYVGPLARGKSDFAWLSRKSADKITPWNFDEIVDKESSAEAFINRMTNYDLYLPNQKVLPKHSLLYEKFTVYNELTKVKYKTEQGKTAFFDANMKQEIFDGVFKVYRKVTKDKLMDFLEKEFDEFRIVDLTGLDKENKAFNASYGTYHDLRKILDKDFLDNSKNEKILEDIVLTLTLFEDREMIRKRLKNYSDLLTKEQLKKLERRHYTGWGRLSAELIHGIRNKESRKTILDYLIDDGNSNRNFMQLINDDALSFKEEIAKAQVIGETDNLNQVVSDIAGSLAIKKGILQNLKIVDELVKIMGHQPENIVVEMARENQFTNQGRRNSQQRLKGLTDSIKEFGSQILKEHPVENSQLQNDRLFLYYLQNGRDMYTGEELDIDYLSQYDIDHIIPQAFIKDNSIDNRVLTSSKENRGKSDDVPSKDVVRKMKSYWSKLLSAKLITQRKFDNLTKGERGGLTDDDKAGFIKRQLVETRQITKHVARILDERFNTETDENNKKIRQVKIVTLKSNLVSNFRKEFELYKVREINDYHHAHDAYLNAVIGKALLGVYPQLEPEFVYGDYPHFHGHKENKATAKKFFYSNIMNFFKKDDVRTDKNGEIIWKKDEYISNIKKVLSYPQVNIVKKVEEQTGGFFKESILPKGDSDKLIPRKTKKFYWDTKKYGGFDSPIVAYSILVIADIEKGKSKKLKTVKALVGVTIMEKMTFERDPVAFLERKGYRNVQEENIIKLPKYSLFKLENGRKRLLASARELQKGNEIVLPNHLGTLLYHAKNIHKVDEPKHLDYVDKHKDEFKELLDVVSNFSKKYTLAEGNLEKIKELYAQNNGEDLKELASSFINLLTFTAIGAPATFKFFDKNIDRKRYTSTTEILNATLIHQSITGLYETRIDLSKLGGD

SEQ ID NO: 162 - protein, 1345 aa, Streptococcus mutans
MKKPYSIGLDIGTNSVGWAVVTDDYKVPAKKMKVLGNTDKSHIEKNLLGALLFDSGNTAEDRRLKRTARRRYTRRRNRILYLQEIFSEEMGKVDDSFFHRLEDSFLVTEDKRGERHPIFGNLEEEVKYHENFPTIYHLRQYLADNPEKVDLRLVYLALAHIIKFRGHFLIEGKFDTRNNDVQRLFQEFLAVYDNTFENSSLQEQNVQVEEILTDKISKSAKKDRVLKLFPNEKSNGRFAEFLKLIVGNQADFKKHFELEEKAPLQFSKDTYEEELEVLLAQIGDNYAELFLSAKKLYDSILLSGILTVTDVGTKAPLSASMIQRYNEHQMDLAQLKQFIRQKLSDKYNEVFSDVSKDGYAGYIDGKTNQEAFYKYLKGLLNKIEGSGYFLDKIEREDFLRKQRTFDNGSIPHQIHLQEMRAIIRRQAEFYPFLADNQDRIEKLLTFRIPYYVGPLARGKSDFAWLSRKSADKITPWNFDEIVDKESSAEAFINRMTNYDLYLPNQKVLPKHSLLYEKFTVYNELTKVKYKTEQGKTAFFDANMKQEIFDGVFKVYRKVTKDKLMDFLEKEFDEFRIVDLTGLDKENKVFNASYGTYHDLCKILDKDFLDNSKNEKILEDIVLTLTLFEDREMIRKRLENYSDLLTKEQVKKLERRHYTGWGRLSAELIHGIRNKESRKTILDYLIDDGNSNRNFMQLINDDALSFKEEIAKAQVIGETDNLNQVVSDIAGSPAIKKGILQSLKIVDELVKIMGHQPENIVVEMARENQFTNQGRRNSQQRLKGLTDSIKEFGSQILKEHPVENSQLQNDRLFLYYLQNGRDMYTGEELDIDYLSQYDIDHIIPQAFIKDNSIDNRVLTSSKENRGKSDDVPSKDVVRKMKSYWSKLLSAKLITQRKFDNLTKAERGGLTDDDKAGFIKRQLVETRQITKHVARILDERFNTETDENNKKIRQVKIVTLKSNLVSNFRKEFELYKVREINDYHHAHDAYLNAVIGKALLGVYPQLEPEFVYGDYPHFHGHKENKATAKKFFYSNIMNFFKKDDVRTDKNGEIIWKKDEHISNIKKVLSYPQVNIVKKVEEQTGGFSKESILPKGNSDKLIPRKTKKFYWDTKKYGGFDSPIVAYSILVIADIEKSKSKKLKTVKALVGVTIMEKMTFERDPVAFLERKGYRNVQEENIIKLPKYSLFKLENGRKRLLASARELQKGNEIVLPNHLGTLLYHAKNIHKVDEPKHLDYVDKHKDEFKELLDVVSNFSKKYTLAEGNLEKIKELYAQNNGEDLKELASSFINLLTFTAIGAPATFKFFDKNIDRKRYTSTTEILNATLIHQSITGLYETRIDLNKLGGD

SEQ ID NO: 163 - protein, 1336 aa, Streptococcus mutans
MKKPYSIGLDIGTNSVGWAVVTDDYKVPAKKMKVLGNTDKSHIKKNLLGALLFDSGNTAEDRRLKRTARRRYTRRRNRILYLQEIFAEEMSKVDDSFFHRLDESFLTDDDKNFDSHPIFGNKAEEDAYHQKFPTIYHLRKHLADSTEKADLRLVYLALAHMIKFRGHFLIEGELNAENTDVQKLFADFVGVYDRTFDDSHLSEITVDASSILTEKISKSRRLEKLINNYPKEKKNTLFGNLIALSLGLQPNFKTNFKLSEDAKLQFSKDTYEEDLEELLGKIGDDYADLFTLAKNLYDAILLSGILTADDSSTKAPLSASMIKRYAEHHEDLEKLKEFIKANKPELYHDIFKDETKNGYAGYIENGVKQDEFYKYLKNTLSKITGSDYFLDQIEREDFLRKQRTFDNGSIPHQIHLQEMHAILRRQGDYYPFLKENQDRIEKILTFRIPYYVGPLARKNSRFAWAEYHSDEAVTPWNFDQVIDKESSAQAFIEHMTNNDLYLPNEKVLPKHSPLYEKYTVYNELTKIKYVTEIGEAKFFDANLKQEIFDGLFKHERKVTKKKLRTFLDKNFDEFRIVDIQGLDKETETFNASYATYQDLLKVIKDKVFMDNPENAEILENIVLTLTLFEDREMIKQRLAKYADVFDKKVIDQLARRHYTGWGRLSAKLLNGIRDKQSCKTIMDYLIDDAQSNRNLMQLITDDNLTFKDDIVKAQYVDNSDDLHQVVQSLAGSPAIKKGILQSLKIVDELVKVMGKEPEQIVVEMARENQTTAKGRRNSQQRYKRLKEAIKDLNHKILKEHPTDNQALQNNRLFLYYLQNGRDMYTGESLDINRLSDYDIDHVIPQAFIKDNSIDNRVLTSSKANRGKSDDVPSEDVVNRMRPFWNKLLSSGLISQRKYNNLTKKELTLDDKAGFIKRQLVETRQITKHVARMLDERFNKEFDDNNKRIRRVKIVTLKSNLVSSFRKEFELYKVREINDYHHAHDAYLNAVVVKALLVKYPKLEPEFVYGEYLKYNSYRERKATQKMFFYSNIMNMFKSKVKLADDQIVERPMIEVNDETGEIAWDKTKHITTVKKVLSYPQVNIVKKVEEQTGGLFDPKSPLEKLVPLKKALNPEKYGGYQKPTTAYPILLIVDTKQLIPISVMDKKRFEQNPVKFLKDKGYQQIEKNNFVKLPKYTLVDIGNGIKRLWASSKEVHKGNQLVVSKKSQDLLYHAHHLDNDYSNEYVKNHYQQFDILFNEITSFSKKCKLGKEHIQKIEEAYSKERDFASIEELADGFIKLLGFTQLGATSPFSFLGIKLNQKQYTGKKDYLEATLIHQSITGLYETRIDLSKLGGD

SEQ ID NO: 164 - protein, 1345 aa, Streptococcus mutans
MKKPYSIGLDIGTNSVGWAVVTDDYKVPAKKMKVLGNTDKSHIKKNLLGALLFDSGNTAADRRLKRTARRRYTRRRNRILYLQEIFAEEMSKVDDSFFHRLEDSFLVTEDKRGERHPIFGNLEEEVKYHENFPTIYHLRQYLADNPEKVDLRLVYLALAHIIKFRGHFLIEGKFDTRNNDVQRLFQEFLAVYDNTFENSSLQEQNVQVEEILTDKISKSAKKDRVLKLFPNEKSNGRFAEFLKLIVGNQADFKKHFELEEKAPLQFSKDTYEEELEVLLAQIGDNYAELFLSAKKLYDSILLSGILTVTDVSTKAPLSASMIQRYNEHQMDLVQLKQFIRQKLSDKYNEVFSDVSKDGYAGYIDGKTNQEAFYKYLKGLLNKIEGSGYFLDKIEREDFLRKQRTFDNGSIPHQIHLQEMRAIIRRQAEFYPFLADNQDRIEKILTFRIPYYVGPLARGKSDFAWLSRKSADKITPWNFDEIVDKESSAEAFINRMTNYDLYLPNQKVLPKHSLLYEKFTVYNELTKVKYKTEQGKTAFFDANMKQEIFDGVFKVYRKVTKDKLMDFLEKEFDEFRIVDLTGLDKENKAFNASYGTYHDLRKILDKDFLDNSKNEKILEDIVLTLTLFEDREMIRKRLENYSDLLTKEQVKKLERRHYTGWGRLSAELIHGIRNKESRKTILDYLIDDGNSNRNFMQLINDDALSFKEEIAKAQVIGETDNLNQVVSDIAGSPAIKKGILQSLKIVDELVKIMGHQPENIVVEMARENQFTNQGRRNSQQRLKGLTDSIKEFGSQILKEHPVEHSQLQNDRLFLYYLQNGRDMYTGEELDIDYLSQYDIDHIIPQAFIKDNSIDNRVLTSSKENRGKSDDVPSKNVVRKMKSYWSKLLSAKLITQRKFDNLTKAERGGLTDDDKAGFIKRQLVETRQITKHVARILDERFHTETDENNKKIRQVKIVTLKSNLVSNFRKEFELYKVREINDYHHAHDAYLNAVIGKALLGVYPQLEPEFVYGDYPHFHGHKENKATAKKFFYSNIMNFFKKDDVRTDKNGEIIWKKDEHISNIKKVLSYPQVNIVKKVEEQTGGFSKESILPKGNSDKLIPRKTKKFYWDTKKYGGFDSPIVAYSILVIADIEKGKSKKLKTVKALVGVTIMEKMTFERDPVAFLERKGYRNVQEENIIKLPKYSLFKLENGRKRLLASARELQKGNEIVLPNHLGTLLYHAKNIHKVDEPKHLDYVDKHKDEFKELLDVVSNFSKKYTLAEGNLEKIKELYAQNNGEDLKELASSFINLLTFTAIGAPATFKFFDKNIDRKRYTSTTEILNATLIHQSITGLYETRIDLSKLGGD

SEQ ID NO: 165 - protein, 1345 aa, Streptococcus mutans
MKKPYSIGLDIGTNSVGWAVVTDDYKVPAKKMKVLGNTDKSHIKKNLLGALLFDSGNTAEDRRLKRTTRRRYTRRRNRILYLQEIFSEEMGKVDDSFFHRLEDSFLVTEDKRGERHPIFGNLEEEVKYHENFPTIYHLRQYLADNPEKTDLRLVYLALAHIIKFRGHFLIEGKFDTRNNDVQRLFQEFLAVYDNTFENSSLQEQNVQVEEILTDKISKSAKKDRVLKLFPNEKSNGRFAEFLKLIVGNQADFKKHFELEEKAPLQFSKDTYEEELEVLLAQIGDNYAELFLSAKKLYDSILLSGILTVTDVSTKAPLSASMIQRYNEHQMDLTQLKQFIRQKLSDKYNEVFSDVSKDGYAGYIDGKTNQEAFYKYLKGLLNKIEGSGYFLDKIEREDFLRKQRTFDNGSIPHQIHLQEMRAIIRRQAEFYPFLADNQDRIEKLLTFRIPYYVGPLASGKSDFAWLSRKSADKITPWNFDEIVDKESSAEAFINRMTNYDLYLPNQKVLPKHSLLYEKFTVYNELTKVKYKTEQGKTAFFDANMKQEIFDGVFKVYRKVTKDKLMDFLEKEFDEFRIVDLTGLDKENKVFNASYGTYHDLCKILDKDFLDNSKNEKILEDIVLTLTLFEDREMIRKRLENYSDLLTKEQVKKLERRHYTGWGRLSAELIHGIRNKESRKTILDYLIDDGNSNRNFMQLINDDALSFKEEIAKAQVIGETDNLNQVVSDIAGSPAIKKGILQSLKIVDELVKIMGHQPENIVVEMARENQFTNQGRRNSQQRLKGLTDSIKEFGSQILKEHPVENSQLQNDRLFLYYLQNGRDMYTGEELDIDYLSQYDIDHIIPQAFIKDNSIDNRVLTSSKENRGKSDDVPSKDVVRKMKSYWSKLLSAKLITQRKFDNLTKAERGGLTDDDKAGFIKRQLVETRQITKHVARILDERFNTETDENNKKIRQVKIVTLKSNLVSNFRKEFELYKVREINDYHHAHDAYLNAVIGKALLGVYPQLEPEFVYGDYPHFHGHKENKATAKKFFYSNIMNFFKKDDVRTDKNGEIIWKKDEHISNIKKVLSYPQVNIVKKVEEQTGGFSKESILPKGNSDKLIPRKTKKFYWDTKKYGGFDSPIVAYSILVIADIEKGKSKKLKTVKALVGVTIMEKMTFERDPVAFLERKGYRNVQEENIIKLPKYSLFKLENGRKRLLASARELQKGNEIVLPNHLGTLLYHAKNIHKVDEPKHLDYVDKHKDEFKELLDVVSNFSKKYTLAEGNLEKIKELYAQNNGEDLKELASSFINLLTFTAIGAPATFKFFDKNIDRKRYTSTTEILNATLIHQSITGLYETRIDLSKLGGD

SEQ ID NO: 166 - protein, 1336 aa, Streptococcus mutans
MKKPYSIGLDIGTNSVGWAVVTDDYKVPAKKMKVLGNTDKSHIKKNLLGALLFDSGNTAADRRLKRTARRRYTRRRNRILYLQEIFAEEMNKVDDSFFHRLDESFLTDDDKNFDSHPIFGNKAEEDAYHQKFPTIYHLRKHLADSTEKADLRLVYLALAHMIKFRGHFLIEGELNAENTDVQKLFADFVGVYDRTFDDSHLSEITVDASSILTEKISKSRRLEKLINNYPKEKKNTLFGNLIALSLGLQPNFKTNFKLSEDAKLQFSKDTYEEDLEELLGKIGDDYADLFTLAKNLYDAILLSGILTADDSSTKAPLSASMIKRYAEHHEDLEKLKEFIKANKPELYHDIFKDETKNGYAGYIENGVKQDEFYKYLKNTLSKIAGSDYFLDKIEREDFLRKQRTFDNGSIPHQIHLQEMHAILRRQGDYYPFLKENQDRIEKILTFRIPYYVGPLARKNSRFAWAEYHSDEAVTPWNFDQVIDKESSAQAFIEHMTNNDLYLPNEKVLPKHSPLYEKYTVYNELTKIKYVTEIGEAKFFDANLKQEIFDGLFKHERKVTKKKLRTFLDKNFDEFRIVDIQGLDKETETFNASYATYQDLLKVIKDKVFMDNPENAEILENIVLTLTLFEDREMIKQRLAKYADVFDKKVIDQLARRHYTGWGRLSAKLLNGIRDKQSCKTIMDYLIDDAQSNRNLMQLITDDNLTFKDDIVKAQYVDNSDDLHQVVQSLAGSPAIKKGILQSLKIVDELVKVMGKEPEQIVVEMARENQTTAKGRRNSQQRYKRLKEAIKDLNHKILKEHPTDNQALQNNRLFLYYLQNGRDMYTGESLDINRLSDYDIDHVIPQAFIKDNSIDNRVLTSSKANRGKSDDVPSEDVVNRMRPFWNKLLSSGLISQRKYNNLTKKELTLDDKAGFIKRQLVETRQITKHVARMLDERFNKEFDDNNKRIRRVKIVTLKSNLVSSFRKEFELYKVREINDYHHAHDAYLNAVVVKALLVKYPKLEPEFVYGEYPKYNSYRERKATQKMFFYSNIMNMFKSKVKLADDQIVERPMIEVNDETGEIAWDKTKHITTVKKVLSYPQVNIVKKVEEQTGGLFDPKSPLEKLVPLKKALNPEKYGGYQKPTTAYPILLIVDTKQLIPISVMDKKRFEQNPVKFLKDKGYQQIEKNNFVKLPKYTLVDIGNGIKRLWASSKEVHKGNQLVVSKKSQDLLYHAHHLDNDYSNEYVKNHYQQFDILFNEITSFSKKCKLGKEHIQKIEEAYSKERDSASIEELADGFIKLLGFTQLGATSPFSFLGIKLNQKQYTGKKDYLEATLIHQSITGLYETRIDLSKLGGD

SEQ ID NO: 167 - protein, 1345 aa, Streptococcus mutans
MKKPYSIGLDIGTNSVGWAVVTDDYKVPAKKMKVLGNTDKSHIKKNLLGALLFDSGNTAADRRLKRTARRRYTRRRNRILYLQEIFAEEMSKVDDSFFHRLEDSFLVTEDKRGERHPIFGNLEEEVKYYENFPTIYHLRQYLADNPEKVDLRLVYLALAHIIKFRGHFLIEGKFDTRNNDVQRLFQEFLAVYDNTFENSSLQEQNVQVEEILTDKISKSAKKDRVLKLFPNEKSNGRFAEFLKLIVGNQADFKKHFELEEKAPLQFSKDTYEEDLEELLGKIGDDYADLFTLAKNLYDAILLSGILTADDSSTKAPLSASMIQRYNEHQMDLAQLKQFIRQKLSDKYNEVFSDVSKDGYAGYIDGKTNQEAFYKYLKGLLNKIEGSGYFLDKIEREDFLRKQRTFDNGSIPHQIHLQEMRAIIRRQAEFYPFLADNQDRIEKILTFRIPYYVGPLARGKSDFAWLSRKSADKITPWNFDEIVDKESSAEAFINRMTNYDLYLPNQKVLPKHSLLYEKFTVYNELTKVKYKTEQGKTAFFDANMKQEIFDGVFKVYRKVTKDKLMDFLEKEFDEFRIVDLTGLDKENKVFNASYGTYHDLCKILDKDFLDNSKNEKILEDIVLTLTLFEDREMIRKRLENYSDLLTKEQVKKLERRHYTGWGRLSAELIHGIRNKESRKTILDYLIDDGNSNRNFMQLINDDALSFKEEIAKAQVIGETDNLNQVVSDIAGSPAIKKGILQSLKIVDELVKIMGHQPENIVVEMARENQFTNQGRRNSQQRLKGLTDSIKEFGSQILKEHPVENSQLQNDRLFLYYLQNGRDMYTGEELDIDYLSQYDIDHIIPQAFIKDNSIDNRVLTSSKENRGKSDDVPSKDVVRKMKPYWSKLLSAKLITQRKFDNLTKAERGGLTDDDKAGFIKRQLVETRQITKHVARILDERFNTETDENNKKIRQVKIVTLKSNLVSNFRKEFELYKVREINDYHHAHDAYLNAVIGKALLGVYPQLEPEFVYGDYPHFHGHEENKATAKKFFYSNIMNFFKKDDVRTDKNGEIIWKKDEHISNIKKVLSYPQVNIVKKVEEQTGGFSKESILPKGNSDKLIPRKTKKFYWDTKKYGGFDSPIVAYSILVIADIEKGKSKKLKTVKALVGVTIMEKMTFERDPVAFLERKGYRNVQEENIIKLPKYSLFKLENGRKRLLASARELQKGNEIVLPNHLGTLLYHAKNIHKVDEPKHLDYVDKHKDEFKELLDVVSNFSKKYTLAEGNLEKIKELYAQNNGEDLKELASSFINLLTFTAIGAPATFKFFDKNIDRKRYTSTTEILNATLIHQSITGLYETRIDLSKLGGD

SEQ ID NO: 168 - protein, 1345 aa, Streptococcus mutans
MKKPYSIGLDIGTNSVGWAVVTDDYKVPAKKMKVLGNTDKSHIKKNLLGALLFDSGNTAEDRRLKRTTRRRYTRRRNRILYLQEIFSEEMGKVDDSFFHRLEDSFLVTEDKRGERHPIFGNLEEEVKYHENFPTIYHLRQYLADNPEKTDLRLVYLALAHIIKFRGHFLIEGKFDTRNNDVQRLFQEFLAVYDNTFENSSLQEQNVQVEEILTDKISKSAKKDRVLKLFPNEKSNGRFAEFLKLIVGNQADFKKHFELEEKAPLQFSKDTYEEELEVLLAQIGDNYAELFLSAKKLYDSILLSGILTVTDVSTKAPLSASMIQRYNEHQMDLTQLKQFIRQKLSDKYNEVFSDVSKDGYAGYIDGKTNQEAFYKYLKGLLNKIEGSGYFLDKIEREDFLRKQRTFDNGSIPHQIHLQEMRAIIRRQAEFYPFLADNQDRIEKLLTFRIPYYVGPLASGKSDFAWLSRKSADKITPWNFDEIVDKESSAEAFINRMTNYDLYLPNQKVLPKHSLLYEKFTVYNELTKVKYKTEQGKTAFFDANMKQEIFDGVFKVYRKVTKDKLMDFLEKEFDEFRIVDLTGLDKENKVFNASYGTYHDLCKILDKDFLDNSKNEKILEDIVLTLTLFEDREMIRKRLENYSDLLTKEQVKKLERRHYTGWGRLSAELIHGIRNKESRKTILDYLIDDGNSNRNFMQLINDDALSFKEEIAKAQVIGETDNLNQVVSDIAGSPAIKKGILQSLKIVDELVKIMGHQPENIVVEMARENQFTNQGRRNSQQRLKGLTDSIKEFGSQILKEHPVENSQLQNDRLFLYYLQNGRDMYTGEELDIDYLSQYDIDHIIPQAFIKDNSIDNRVLTSSKENRGKSDDVPSKDVVRKMKSYWSKLLSAKLITQRKFDNLTKAERGGLTDDDKAGFIKRQLVETRQITKHVARILDERFNTETDENNKKIRQVKIVTLKSNLVSNFRKEFELYKVREINDYHHAHDAYLNAVIGKALLGVYPQLEPEFVYGDYPHFHGHKENKATAKKFFYSNIMNFFKKDDVRTDKNGEIIWKKDEHISNIKKVLSYPQVNIVKKVEEQTGGFSKESILPKGNSDKLIPRKTKKFYWDTKKYGGFDSPIVAYSILVIADIEKGKSKKLKTVKALVGVTIMEKMTFERDPVAFLERKGYRNVQEENIIKLPKYSLFKLENGRKRLLASARELQKGNEIVLPNHLGTLLYHAKNIHKVDEPKHLDYVDKHKDEFKELLDVVSNFSKKYTLAEGNLEKIKELYAQNNGEDLKELASSFINLLTFTAIGAPATFKFFDKNIDRKRYTSTTEILKATLIHQSITGLYETRIDLSKLGGD

SEQ ID NO: 169 - protein, 1338 aa, Streptococcus mutans
MDLIGTNSVGWAVVTDDYKVPAKKMKVLGNTDKSHIKKNLLGALLFDSGNTAADRRLKRTARRRYTRRRNRILYLQEIFAEEMSKVDDSFFHRLEDSFLVTEDKRGERHPIFGNLEEEVKYHENFPTIYHLRQYLADNPEKVDLRLVYLALAHIIKFRGHFLIEGKFDTRNNDVQRLFQEFLAVYDNTFENSSLQEQNVQVEEILTDKISKSAKKDRVLKLFPNEKSNGRFAEFLKLIVGNQADFKKHFELEEKAPLQFSKDTYEEELEVLLAQIGDNYAELFLSAKKLYDSILLSGILTVTDVSTKAPLSASMIQRYNEHQMDLAQLKQFIRQKLSDKYNEVFSDVSKDGYAGYIDGKTNQEAFYKYLKGLLNKIEGSGYFLDKIEREDFLRKQRTFDNGSIPHQIHLQEMRAIIRRQAEFYPFLADNQDRIEKILTFRIPYYVGPLARGKSDFAWLSRKSADKITPWNFDEIVDKESSAEAFINRMTNYDLYLPNQKVLPKHSLLYEKFTVYNELTKVKYKTEQGKTAFFDANMKQEIFDGVFKVYRKVTKDKLMDFLEKEFDEFRIVDLTGLDKENKAFNASYGTYHDLRKILDKDFLDNSKNEKILEDIVLTLTLFEDREMIRKRLENYSDLLTKEQVKKLERRHYTGWGRLSAELIHGIRNKESRKTILDYLIDDGNSNRNFMQLINDDALSFKEEIAKAQVIGETDNLNQVVSDIAGSPAIKKGILQSLKIVDELVKIMGHQPENIVVEMARENQFTNQGRRNSQQRLKGLTDSIKEFGSQILKEHPVEHSQLQNDRLFLYYLQNGRDMYTGEELDIDYLSQYDIDHIIPQAFIKDNSIDNRVLTSSKENRGKSDDVPSKNVVRKMKSYWSKLLSAKLITQRKFDNLTKAERGGLTDDDKAGFIKRQLVETRQITKHVARILDERFHTETDENNKKIRQVKIVTLKSNLVSNFRKEFELYKVREINDYHHAHDAYLNAVIGKALLGVYPQLEPEFVYGDYPHFHGHKENKATAKKFFYSNIMNFFKKDDVRTDKNGEIIWKKDEHISNIKKVLSYPQVNIVKKVEEQTGGFSKESILPKGNSDKLIPRKTKKFYWDTKKYGGFDSPIVAYSILVIADIEKGKSKKLKTVKALVGVTIMEKMTFERDPVAFLERKGYRNVQEENIIKLPKYSLFKLENGRKRLLASARELQKGNEIVLPNHLGTLLYHAKNIHKVDEPKHLDYVDKHKDEFKELLDVVSNFSKKYTLAEGNLEKIKELYAQNNGEDLKELASSFINLLTFTAIGAPATFKFFDKNIDRKRYTSTTEILNATLIHQSITGLYETRIDLSKLGGD

SEQ ID NO: 170 - protein, 1362 aa, Streptococcus oralis
ENKNYSIGLDIGTNSVGWAVITDDYKVPSKKMKVLGNTDKRFIKKNLIGALLFDEGTTAEARRLKRTARRRYTRRKNRLRYLQEIFAEEMSKVDSSFFHRLDDSFLIPEDKKGSKYPIFATLIEEKEYHKQFPTIYHLRKQLADSKEKTDLRLIYLALAHMIKYRGHFLYEDTFDIKNNDIQKIFNEFISIYNNTFEGNSLSGQNVQVEAIFTDKISKSAKRERVLKLFPDEKSTGLFSEFLKLIVGNQADFKKHFDLEEKAPLQFSRDTYDEDLENLLGQIGDDFADLFVAAKKLYDAILLSGILTVTDPSTKAPLSASMIERYENHQKDLATLKQFIKTNLPEKYDEVFSDQSKDGYAGYIDGKTTQESFYKYIKNLLSKFEGADYFLEKIEREDFLRKQRTFDNGSIPHQIHLQEMNAILRRQGEHYPFLKENKEKIEKILTFRIPYYVGPLARGNRDFAWLTRNSDQAIRPWNFEEIVDKASSAESFINKMTNYDLYLPEEKVLPKHSLLYETFAVYNELTKVKFIAEGLRDYQFLDSRQKKDIFYTLFKAEDKRKVTEKDIIQYLHTVDGYDGIELKGIEKQFNASLSTYHDLLKIIKDKEFMDDPNNEEILENIVHTLTIFEDREMIKQRLAQYDSLFDEKVIKALTRRHYTGWGKLSSKLINGIRDKQTGKTILDYLMDDGYNNRNFMQLINDDELSFKEIIKKAQVVGKTDDVKQVVQELPGSPAIKKGILQSIKLVDELVKVMGHEPESIVIEMARENQTTARGKKNSQQRYKRIEDSLKILASKILKEHPTDNIQLQNDRLFLYYLQNGRDMYTGKPLDINQLSSYDIDHIVPQAFIKDDSLDNRVLTSLKDNRGKSDNVPSLEVVEKMKTFWQQLLDSKLISYRKFNNLTKAERGGLDERDKVGFIKRQLVETRQITKHVAQILDARYNTEVNEKDKKNRTVKIITLKSNLVSNFRKEFRLYKIREINDYHHAHDAYLNAVVAKAILKKYPKLEPEFVYGDYQKYDLSKDPKEIEKATEKYFFYSNLLNFFKEEVHYADGTIVKRENIEYSKDTGEIAWNKEKDFATIKKVLSLPQVNIVKKREVQTGGFSKESILPKGNSDKLIPRKTKDILWDTTKYGGFDSPVIAYSILLIADIEKGKAKRLKTVKTLVGITIMEKATFEKSPIAFLENKGYHNVRKENILCLPKYSLFELKNGRRRMLASAKELQKGNEIVLPVHLTTLLYHAKNIHRLDEPEHLEYIQKHRNEFKGLLNLVSEFSQKYVLADANLEKIKNLYADNEQADIEILANSFINLLTFTALGAPAAFKFFGKDVDRKRYTTVSEILNATLIHQSITGLYETRIDLSKLGED

SEQ ID NO: 171 - protein, 1360 aa, Streptococcus oralis
ENKNYSIGLDIGTNSVGWSVITDDYKVPSKKMKVLGNTDKRFIKKNLIGALLFDEGTTAEARRLKRTARRRYTRRKNRLRYLQEIFAEEMSKVDSSFFHRLDDSFLIPEDKRGSKYPIFATLAEEKEYHKQFPTIYHLRKQLADSKEKTDLRLIYLALAHMIKYRGHFLYEDTFDIKNNDIQKIFSEFISIYDNTFEGSSLSGQNAQVEAIFTDKISKSAKRERVLKLFPDEKSTGLFSEFLKLIVGNQADFKKHFDLGEKAPLQFSKDTYDEDLENLLGQIGDDFADLFLVAKKLYDAILLSGILTVTDPSTKAPLSASMIERYENHQKDLAVLKQFIKNNLPEKYDEVFSDQSKDGYAGYIDGKTTQEAFYKYIKNLLSKFEGTDYFLEKIEREDFLRKQRTFDNGSIPHQIHLQEMNAILRRQGEHYPFLKDNKEKIEKILTFRIPYYVGPLARGNRDFAWLTRNSDEAIRPWNFEEIVDKASSAEDFINKMTNYDLYLPEEKVLPKHSLLYETFAVYNELTKVKFIAEGLRDYQFLDSGQKKQIVTQLFKEKRKVTEKDIIQFLHNVDGYDGIELKGIEKQFNASLSTYHDLLKIIKDKEFMDDSKNEEILENIVHTLTIFEDREMIKQRLAQYDSLFDEKVIKALIRRHYTGWGKLSAKLIDGICDKQTGNTILDYLIDDGKNNRNFMQLINDDGLSFKEITQKAQVVGKTDDVKQVVQELPGSPAIKKGILQSIKIVDELVKVMGHTPESIVIEMARENQTTARGKKNSQQRYKRIEDALKNLASNILKEHPTNNIQLQNDRLFLYYLQNGRDMYTGKPLDINQLSSYDIDHIVPQAFIKDDSLDNRVLTSLKDNRGKSDNVPSIEVVQKRKAFWQQLLDSKLISERKFNNLTKAERGGLDERDKVGFIKRQLVETRQITKHVAQILDARFNKEVNEKDKKNRTVKIITLKSNLVSNFRKEFRLYKVREINDYHHAHDAYLNAVVAKAILKKYPKLEPEFVYGDYQKYDLSRNPKEVEKATEKYFFYSNLLNFFKEEVHYADGTIVKRENIEYSKDTGEIAWNKEKDFATIKKVLSYPQVNIVKKREVQTGGFSKESILPKGNSDKLIPRKTKDILWETTKYGGFDSPVIAYSILLIADIEKGKAKKLKTVKTLVGITIMEKAAFEENPITFLENKGYHNVRKENILCLPKYSLFELENGRRRLLASAKELQKGNEIVLPVYLTTLLYHSKNVHKLDEPEHLEYIQKHRNEFKDLLNLVSEFSQKYVLADANLEKIQNLYADNEQADIEILANSFINLLTFTALGAPAAFKFFGKDIDRKRYTTVSEILNATLIHQSITGLYETRIDLSKLGED

SEQ ID NO: 172 - protein, 1358 aa, Streptococcus parasanguinis
KKPYSIGLDIGTNSVGWAVITDDYKVPAKKMKVLGNTNKESIKKNLIGALLFDAGNTAADRRLKRTARRRYTRRRNRILYLQEIFAAEMNKVDESFFHRLDDSFLVPEDKRGSKYPIFGTLEEEKEYHKQFPTIYYLRKILADSKEKVDLRLIYLALAHIIKYRGHFLYEDSFDIKNNDIQKIFNEFTILYDNTFEESSLSKGNAQVEEIFTDKISKSAKRDRVLKLFPDEKSTGLFSEFLKLIVGNQADFKKHFDLEEKAPLQFSKDTYEEDLESLLGQIGDVYADLFVVAKKLYDAILLAGILSVKDPGTKAPLSASMIERYDNHQNDLSALKQFVRRNLPEKYAEVFSDDSKDGYAGYIDGKTTQEGFYKYIKNLISKIEGAEYFLEKIEREDFLRKQRTFDNGSIPHQIHLQEMNAILRHQGEYYPFLKENKDKIEQILTFRIPYYVGPLARGNSDFAWLSRNSDEAIRPWNFEEMVDKSSSAEDFIHRMTNYDLYLPEEKVLPKHSLLYETFTVYNELTKVKYIAEGMKDYQFLDSGQKKQIVNQLFKEKRKVTEKDIIHYLHNVDGYDGIELKGIEKHFNSSLSTYHDLLKIIKDKEFMDDPKNEEIFENIVHTLTIFEDRVMIKQRLNQYDSIFDEKVIKALTRRHYTGWGKLSAKLINGIRDKKTSKTILDYLIDDGYSNRNFMQLINDDGLSFKETIQKAQVVGETNDVKQVVQELPGSPAIKKGILQSIKIVDELVKVMGHAPESVVIEMARENQTTNKGKSKSQQRLKTLSDAISELGNILKEHPTDNIQLQNDRLFLYYLQNGKDMYTGEALDINQLSNYDIDHIIPQAFIKDDSLDNRVLTSSKDNRGKSDNVPSLEIVEKMKGFWQQLLDSKLISERKFNNLTKAERGGLDERDKVGFIKRQLVETRQITKHVAQILDDRFNAEVNEKNQKLRSVKIITLKSNLVSNFRKEFGLYKVREINDYHHAHDAYLNAVVAKAILKKYPKLEPEFVYGDYQKYDLTKDPKEIEKATEKYFFYSNLLNFFKDKVYYADGTIIQRGNVEYSKDTGEIAWNKKRDFAIVRKVLSYPQVNIVKKTEEQTGGFSKESILPKGNSDKLIPRKTKNVQLDTTKYGGFDSPVIAYSILLVADVEKGKSKKLKTVKSLIGITIMEKVKFEANPVAFLEGKGYQNVVEENIIRLPKYSLFELENGRRRMLASAKELQKGNEMVLPSYLIALLYHAKRIQKKDEPEHLEYIKQHHSEFNDLLNFVSEFSQKYVLAESNLEKIKNLYIDNEQTNMEEIANSFINLLTFTAFGAPAVFKFFGKDIERKRYSTVTEILKATLIHQSLTGLYETRIDLSKLGEE

SEQ ID NO: 173 - protein, 1327 aa, Streptococcus parauberis
MKVLGNTDRQTVKKNMIGTLLFDSGETAEARRLKRTARRRYTRRINRIKYLQSIFDDEMSKIDSAFFQRIKDSFLVPDDKNDDRHPIFGNIKDEVDYHKNYPTIYHLRKKLADSDEKADLRLIYLALAHIIKFRGHFLIEGDLDSQNTDVNALFLKLVDTYNLMFEDDIDTQTIDATVILTEKMSKSRRLENLIAKIPNQKKNTLFGNLISLSLGLTPNFKANFELSEDAKLQISKESFEEDLDNLLAQIGDQYADLFIAAKNLSDAILLSDILTVKGVNTKAPLSASMVQRFNEHQDDLKLLKKLVKVQLPEKYKEIFDIKDKNGYAGYINGKTSQEDFYKYIKPILSKLKGAESLISKLEREDFLRKQRTFDNGSIPHQIHLNELKSIIRRQEKYYPFLKDKQVRIEKIFTFRIPYFVGPLANGNSSFAWVKRRSNESITPWNFEEVVEQEASAKVFIERMTNFDTYLPEEKVLPKHSLLYEMFTVYNELTKVKYQAEGMRKPEFLSSEEKIEIVSNLFKTERKVTVKQLKENYFNKIRCLDSITISGVEDKFNASLGTYHDLLNIIKNQKILDDEQNQDSLEDIVLTLTLFEDEKMIAKRLSKYESIFDPSILKKLKKRHYTGWGRLSQKLINGIRDKQTGKTILDFLIDGQANRNFMQLINDPSLDFASIIKEAQEKTIKSEKLEETIANLAGSPAIKKGILQSVKIVDEVVKVMGYEPSNIVIEMARENQSTQRGINNSRERLRKLEEVHKNIGSKILKEHEISNAQLQSDRVYLYLLQDGKDMYTGKDLDFDRLSQYDIDHIIPQSFIKDNSIDNIVLTSQESNRGKSDNVPYIAIVNKMKSYWQHQLKSGAISQRKFDNLTKAERGGLSEYDKAGFIKRQLVETRQITKHVAQILNNRFNNNVDDSSKNKRPVKIITLKSKMVSDFRKEFGFYKIREVNDYHHAHDAYLNAVVGTALLKKYPKLEAEFVYGDYKHYDLSDTSLGKATAKMFFYSNIMNFFKKEVRLADGTVITRPQIETNTETGEIVWDKVKDIKTIRKVLSIPQINVVKKTEVQTGGFSKESILSKRDSDKLIPRKNNWDPKKYGGFGSPIIAYSVLVVAKVTKGKSQKTKSVKELVGITIMEQNEFEKDRITFLEKKGYQDIQESLIIKLPKFSLFELENGRKRLLASELQKGNELSLPNKYIQFLYLASRYTSFSGKEEDREKHRHFVESHLHYFDEIKDIIADFSRRYILADANLEKILTLYNEKNQFSIEEQATNMLNLFTFTGLGAPATLKFFNVDIDRKRYTSSTEILNSTLIRQSITGLYETRIDLSKIGGD

SEQ ID NO: 174 - protein, 1355 aa, Streptococcus phocae
KKSYSIGLDIGTNSVGWAVITDDYKVPAKKMKVLGNTSRQSIKKNMIGALLFDEGGPAASTRVKRTTRRRYTRRKNRLCYLRDIFESEMHTIDKHFFLRLEDSFLHKSDKRYEAHPIFGTLQEEKAYHDNYPTIYHLRKALADNTEKADLRLIYLALAHIIKFRGHFLIEGALSANNTDVQQLVHALVDAYNIMFEEDLDIEAIDVKAILTEKISKTRRLENLISNIPGQKKNGLFGNLIALSLGLTPNFKSHFNLPEDAKLQLAKDTYDEELNNLLTQIGDEYADLFLSAKNLSDAILLSDILTVNGDGTQAPLSASLIKRYEEHRQDLALLKQMFKEQLPDLYRDVFTDENKDGYAGYISGKTSQEAFYKYIKPILETLDGAEDFLTKINREDFLRKQRTFDNGSIPHQIHLGELQAILERQQAYYPFLKDNQEKIEKILTFRIPYYIGPLARGNSRFAWLTRTSDQKITPWNFDEMVDQEASAQAFIERMTNFDEYLPQEKVLPKHSLTYEYFTVYNELTKVKYVTEGMTKPEFLSAGQKEQIVELLFKKYRKVTVKQLKEDFFSKIECFDTVDISGVEDKFNASLGTYHDLLKIIKDKAFLDNSENENIIEDIILTLTLFEDKEMIANRLAVYEDLFDQNVLKQLKRRHYTGWGRLSKQLINGMRDKHTGKTILDFLKDGFINRNFMQLINDDNLSFKEEIKKAQEGGLKDSINDQIRDLAGSPAIKKGILQTINIVDEIVKIMGKAPQHIVVEMARDVQKTDIGVKQSRERMKRVQEVLKKLGSQLLKEHPVENFQLQNERLYLYYLQNGKDMYTGEELSISNLSHYDIDHIIPRSFIKDDSIDNKVLTRSEHNRGKTDNVPSIEVVKRMKPYWQKLLDTKVISQRKFDNLTKAERGGLQESDKANFIQRQLVETRQITKHVAQILDSRFNTERDEKDRPIRRVKVITLKSKFVSDFRQDFGFYKLREINDYHHAHDAYLNAVVGTALLKMYPKLASEFVYGDYQKYDLSGKASGHATAKYFFYSNLMNFFKSEVKLANGNIIKRSPIEVNEETGEIVWDKTKDFGTVRKVLSAPQVNIVKKTEIQTGGFSNETILSKGKSSKLIPRKNKWRDTTKYGGFNTPTVAYSVLVVAKVEKGKAKKLKPVKELVGITIMERTKFEANPIAFLESKGYHDIQEHLMITLPKYSLFELENGRRRLLASELQKGNEMVLPQHLVTFLYRVSKRDKGTQSENMEYISNHKEKFIEIFHYIIRYAEKNVIKPKVIERLNDTFNQKFNDSDLTELSISFLNLFKFTSFGAPEKFTFLNSEIKQDDVRYRSTKECLNSTLIHQSVTGLYETRIDLSQFGGD

SEQ ID NO: 175 - protein, 1361 aa, Streptococcus pseudopneumoniae
SNKPYSIGLDIGTNSVGWAVITDDYKVPSKKMKVLGNTDKHFIKKNLIGALLFDEGTTAEDRRLKRTARRRYTRRKNRLRYLQEIFSEEISKVDNSFFHRLDDSFLVPEDKRGSKYPIFATLTEEKEYYKQFPTIYHLRKQLADSKEKADLRLIYLTLAHMIKYRGHFLYEESFDIKNNDIQKIFNEFISIYDNTFEGSSLSGQNAQVEAIFTDKISKSTKRERVLKLFPDQKSTGLFSEFLKLIVGNQADFKKHFDLEEKAPLQFSKDTYDEDLENLLGQIGDDFADLFLVAKKLYDAILLSGILTVTDPSTKAPLSASMIERYENHQKDLAALKQFIKNNLPEKYDEVFSDQSKEGYAGYIDSKTTQEAFYKYIKNLLSKIDGADYLLDKIEREDFLRKQRTFDNGSIPHQIHLQEMNAILRRQGEHYPFLKENREKIEKILTFRIPYYVGPLARGNRDFAWLTRNSDQAIRPWNFEEIVDKASSAEAFINKMTNYDLYLPEEKVLPKHSLLYETFAVYNELTKVKFIAEGLRDYQFLDSGQKKKIINQLFKEKRKVTEKDLIHYLHNVDGYDGIELKGIEKQFNASLSTYHDLLKIIKDKRFMDEPKNQEILENIVHTLTIFEDREMIKQRLAQYASIFDEKVIKTLTRRHYTGWGKLSAKLINCIRDRKTGKTILDYLIDDGYNNRNFMQLINDDGLSFKEIIQESQVVGKPDDVKQIVQELPGSSAIKKGILQSIKLVDELVKVMGHDPESIVIEMARENQTTARGKKNSQQRYKRIEDSLKILASNILKEHPTDNIQLQNDRLFLYYLQNGKDMYTGNPLDINHLSSYDIDHIIPQAFIKDDSLDNRVLTSSKDNRGKSDNVPSLEVVQKRKAFWQQLLESKLISERKFNNLTKAERGGLNERDKVGFIKRQLVETRQITKHVAQILDSRFNTKVNEKNQKIRTVKIITLKSNLVSNFRKEFRLYKVREINDYHHAHDAYLNAVVAKAILKKYPKLEPEFVYGDYQKYDLSRDPKEIEKATEKYFFYSNLLNFFKEEVHYADGTIVKRENIEYSKDTGEIAWNKEIDFATIRKILSLSQVNIVKKTEEQTGGLFDNNIVSKKKVVDASKLIPIKSGLSPEKYGGYARPTIAYSVLVIADIEKGKAKKLKRIKEMVGITIQDKKKFEANPTAYLEEYGYKNINPNLIIKLPKYSLFKFNDGQRRLLASSIELQKGNELILPYHFTTLLYHAQRINKISEPIHKQYVETHQSEFEELLTTIISLSKKYIQKPIVESLLQQAFEQADKDIYQLSESFISLLKLTSFGAPGAFRFLGVEISQSNVRYQSVSSCFNATLIHQSITGLYETRIDLSKLGED

SEQ ID NO: 176 - protein, 1361 aa, Streptococcus pseudopneumoniae
SNKPYSIGLDIGTNSVGWVIITDDYKVPSKKMKVLGNTDKHFIKKNLIGALLFDEGTTAEDRRLKRTARRRYTRRKNRLRYLQEIFAEEMNKVDSSFFHRLDDSFLVPEDKRGSKYPIFATLAEEKEYHKNFPTIYHLRKQLADSKEKADLRLIYLALAHMIKYRGHFLYEEAFDIKNNDIQKIFNEFINIYDNTFEGSSLSGQNEQVEAIFSDKISKSAKRERVLKLFPDEKSTGLFSEFLKLIVGNQADFKKHFDLEEKAPLQFSKDTYDEDLENLLGQIGDGFADLFLVAKKLYDAILLSGILTVTDPSTKAPLSASMIERYQNHQNDLASLKQFIKNNLPEKYDEVFSDQSKDGYAGYVDGKTTQEAFYKYIKNLLSKFEGADYFLEKIEREDFLRKQRTFDNGSIPHQIHLQEMNAILRRQGEHYPFLKENKEKIEKILTFRIPYYVGPLARGNRDFAWLTRNSDQAIRPWNFEEIVDKASSAEDFINKMTNYDLYLPEEKVLPKHSLLYETFAVYNELTKVKFIAEGLRDYQFLDSGQKKQIVNQLFKEKRKVTEKDIIQYLHNVDGYDGIELKGIEKQFNASLSTYHDLLKIIKDKEFMDDSKNEEILENIVHTLTIFEDREMIKQRLAQYDSIFDEKVIKALTRRHYTGWGKLSAKLINGIRDKQTGKTILDYLIDDGYSNRNFMQLINDDGLSFKEIIQKAQVFGKTNDVKQVVQELPGSPAIKKGILQSIKIVEELVKVMGHEPESIVIEMARENQTTTRGKKNSQQRYKRIENSLKILASKILKEHPTDNNQLQNDRLFLYYLQNGKDMYTGEALDINQLSSCDIDHIIPQAFIKDDSLDNRVLTSSKENRGKSDNVPCLEVVDKMKVFWQQLLDFKLISYRKFNNLTKAERGGLDERDKVGFIRRQLVETRQITKHVAQILDSRFNTEVTEKDKKNRNVKIITLKSNLVSNFRKEFGLYKVREINDYHHAHDAYLNAVVAKAILKKYPKLEPEFVYGDYQKYDLSKDPKDIEKATEKYFFYSNLLNFFKEEVHYADGTIVKRENIEYSKDTGEIAWNKEKDFATIKKILSLPQVNIVKKTEEQTGGLFDNNIVSKKKVVDASKLIPIKSGLSPEKYGGYARPTIAYSVLVIADIEKGKTKKLKRIKEMIGITVQDKKIFESNPIAYLEECGYKNINPNLIIKLPKYSLFEFNGGQRRLLASSIELQKGNELILPYHFTALLYHTQRINKISEPIHKQYVEAHQNEFKELLTTIISLSKKYIQKPNVESLLQQAFEQADKDIYQLSESFISLLKLTSFGAPGAFKFLGVEISQSSVRYKPNSQFLDATLIHQSITGLYETRIDLSKLGED

SEQ ID NO: 177 - protein, 1363 aa, Streptococcus pseudopneumoniae
SNKPYSIGLDIGTNSVGWAVITDDYKVPSKKMTVLGNTDKHFIKKNLIGALLFDEGTTAEDRRLKRTARRRYTRRKNRLRYLQEIFSGEMSKVDSSFFHRLDDSFLVPEDKRGSKYPIFATLVEEKEYHKQFPTIYHLRKQLADSKEKADLRLIYLVLAHMIKYRGHFLYEEAFDIKNNDIQKIFNEFISIYDNTFEGSSLSGQNAQVETIFTDKISKSAKRERVLKLFPDEKSTGLFSEFLKLIVGNQADFKKHFDLGEKAPLQFSKDTYDEDLENLLGQIGDDFADLFLVAKKLYDAILLSGILTVTDPSTKAPLSASMIERYENHQKDLTTLKQFIKNNLPEKYDEVFSDQSKDGYAGYIDGKTTQEAFYKYIKNLLSKFEGTDYFLEKIEREDFLRKQRTFDNGSIPHQIHLQEMNAILRRQGEHYPFLKENKEKIEKILTFRIPYYVGPLARGNRDFAWLTRNSDQAIRPWNFEEIVDKASSAEDFINKMTNYDLYLPEEKVLPKHSLLYETFAVYNELTKVKFIAEGLRDYQFLDSGQKKQIVNQLFKEKRKVTEKDIIHYLHTVDGYDGIELKGIEKQFNASLSTYHDLLKIIKDKEFMDDSKNEAILENIVHTLTIFEDREMIKQRLAQYDSLFDKKVIKALTRRHYTGWGKLSAKLINGICDKQTGNTILDYLIDDGEINRNFMQLINDDGLSFKKIIQKSQVVGETDDVKQVVRELPGSPAIKKGILQSIKIVDELVKVMDHAPESIVIEMARENQTTARGKKNSQQRYKRIEDSLKILASNILKENPTDNNQLQNDRLFLYYLQNGKDMYTGEALDINQLSSYDIDHIIPQAFIKDDSLDNRVLTSSKDNRGKSDNVPSLEVVQKRKAFWQQLLDSKLISERKFNNLTKAERERDGLNELDKVGFIKRQLVETRQITKHVAQILDARFNKEVTEKDKKNRNVKIITLKSNLVSNFRKEFRLYKVREINDYHHAHDAYLNAVVAKAILKKYPKLEPEFVYGDYQKNDLSKDPKDIEKATEKYFFYSNLLNFFKEEVHYADGTIVKRENIEYSKDTGEIAWNKEKDFATIKKVLSYPQVNIVKKTEEQTGGLFDNNIVSKEKVVDASKLIPIKSGLSPEKYGGYARPTIAYSVLVIADIEKGKTKKLKRIKEMVGITIQDKKKFEANPIAYLEECGYKNINPNLIIKLPKYSLFEFNGGQRRLLASSIELQKGNELILPYHFTALLYHAQRINKFSEPIHKQYVEAHQNEFKELLTIIISLSKKYIQKPNVESLLHQAFEQADNDIYQLSESFISLLKLTSFGAPGAFKFLGAEISQSSVRYKPNSQFLDTTLIHQSITGLYETRIDLSKLGED

SEQ ID NO: 178 - protein, 1360 aa, Streptococcus pseudoporcinus
YSYSIGLDIGTNSVGWAVINEDYKVPAKKMTVFGNTDRKTIKKNLLGTVLFDSGETAQARRLKRTNRRRYTRRRYRLCQLQNIFATEMVKVDDTFFQRLSESFFYYQDKAFDKHPIFGNSKEERAYHKTYPTIYHLRKDLADRDQKADLRLIYLALSHIIKFRGHFLIEGKLNSENTDVQKLFIALVTVYNLLFEEEIAGETCDAKALLTAKTSKSKRLESLISEFPGQKKNGLFGNLLALALGLRPNFKSNFGLSEDAKLQITKDTYEEELDNLLAEIGDHYADLFLAAKNLSDAILLSDILTLSDENTRAPLSASMIKRYEEHQEDLALLKKLVKEQMPEKYWEIFSNAKKNGYAGYIEGKVSQEDFYRYIKPILSRLKGGDEFLAKIDRDDFLRKQRTFDNGSIPHQIHLKELHAILRRQEKYYPFLAEQKEKIEQLLCFRIPYYVGPLAKGGNSSFAWLKRRSDEPITPWNFKDVVDEEASAQAFIEGMTNYDTYLPEEKVLPKHSPLYEMFTVYNELTKVKYIAENMTKPLYLSAEQKEAIIDHLFKQTRKVTVKDLKEKYFSQIEGLENVDVTGVEGAFNASLGTYNDLLKIIKDKAFLDDEANAEILEEIVLILTLFQDEKLIEKRLAKYANLFEKSVLKKLRKRHYRGWGRLSRQLIDGMKDKASGKTILDFLKDDFANRNFIQLINDSSLDFEKLIDDAQKKAIKRESLTEAVANLAGSPAIKKGILQSLKVVDEIVKVMGHNPDNIVIEMSRENQTTAQGLKNARQRLKKIKEVHKKTGSRILEDNSERITNLTLQDNRLYLYLLQDGKDMYTGQDLDINNLSQYDIDHIIPQSFIKDNSIDNLVLTTQKANRGKSDNVPSIEVVRDMKDRVWRRQLANGAISRQKFDHLTKAERGGLADSDKARFLRRQLVETRQITKHVAQLLDSRFNSKSNQNKKLARNVKIITLKSKIVSDFRKDFGLYKLREVNNYHHAHDAYLNAVVGTALLKKYPKLEAEFVYGDYKHFDLSDPSLGKATAKVFFYSNIMNFFKEELSLADGTLMKRPVIETNTETGEVVWDKVKDFKTIRKVLSYPQVNIVKKTEIQSGAFSKESVLSKGNSDKLIERKKGWDPKKYGGFDSPNTAYSIFVVAKVAKRKAQKLKTVKEIVGITIMEQAEYEKDNIAFLEKKGYQDIQEKLLIKLPKYSLFELENGRRRLLASEFQKGNELALSGKYMKFLYLASRYDKLSSKIESEQQKKLFVEQHLHYFDEILDIVVKHATCYIKAENNLKKIISLYKKKEAYSINEQALNMLNLFIFTSLGAPSTFVFFDETIDRKRYTTSSDVLNGILIQQSITGLYETRIDLSRFGGD

SEQ ID NO: 179 - protein, 1316 aa, Streptococcus pseudoporcinus
MLGTVLFDSGETAQARRLKRTNRRRYTRRRYRLCQLQNIFATEMVKVDDTFFQRLSESFFYYQDKAFDKHPIFGNSKEERAYHKTYPTIYHLRKDLADRDQKADLRLIYLALSHIIKFRGHFLIEGKLNSENTDVQKLFIALVTVYNLLFEEEIAGETCDAKALLTAKTSKSKRLESLISEFPGQKKNGLFGNLLALALGLRPNFKSNFGLSEDAKLQITKDTYEEELDNLLAEIGDHYADLFLAAKNLSDAILLSDILTLSDENTRAPLSASMIKRYEEHQEDLALLKKLVKEQMPEKYWEIFSNAKKNGYAGYIEGKVSQEDFYRYIKPILSRLKGGDEFLAKIDRDDFLRKQRTFDNGSIPHQIHLKELHAILRRQEKYYPFLAEQKEKIEQLLCFRIPYYVGPLAKGGNSSFAWLKRRSDEPITPWNFKDVVDEEASAQAFIEGMTNYDTYLPEEKVLPKHSPLYEMFTVYNELTKVKYIAENMTKPLYLSAEQKEAIIDHLFKQTRKVTVKDLKEKYFSQIEGLENVDVTGVEGAFNASLGTYNDLLKIIKDKAFLDDEANAEILEEIVLILTLFQDEKLIEKRLAKYANLFEKSVLKKLRKRHYRGWGRLSRQLIDGMKDKASGKTILDFLKDDFANRNFIQLINDSSLDFEKLIDDAQKKAIKRESLTEAVANLAGSPAIKKGILQSLKVVDEIVKVMGHNPDNIVIEMSRENQTTAQGLKNARQRLKKIKEVHKKTGSRILEDNSERITNLTLQDNRLYLYLLQDGKDMYTGQDLDINNLSQYDIDHIIPQSFIKDNSIDNLVLTTQKANRGKSDNVPSIEVVRDMKDRVWRRQLANGAISRQKFDHLTKAERGGLADSDKARFLRRQLVETRQITKHVAQLLDSRFNSKSNQNKKLARNVKIITLKSKIVSDFRKDFGLYKLREVNNYHHAHDAYLNAVVGTALLKKYPKLEAEFVYGDYKHFDLSDPSLGKATAKVFFYSNIMNFFKEELSLADGTLMKRPVIETNTETGEVVWDKVKDFKTIRKVLSYPQVNIVKKTEIQSGAFSKESVLSKGNSDKLIERKKGWDPKKYGGFDSPNTAYSIFVVAKVAKRKAQKLKTVKEIVGITIMEQAEYEKDNIAFLEKKGYQDIQEKLLIKLPKYSLFELENGRRRLLASEFQKGNELALSGKYMKFLYLASRYDKLSSKIESEQQKKLFVEQHLHYFDEILDIVVKHATCYIKAENNLKKIISLYKKKEAYSINEQALNMLNLFIFTSLGAPSTFVFFDETIDRKRYTTSSDVLNGILIQQSITGLYETRIDLSRFGGD

SEQ ID NO: 180 - protein, 1359 aa, Streptococcus sanguinis
KKPYSIGLDIGTNSVGWAVVTDDYKVPAKKMRVFGDTDRSHIKKNLLGTLLFDDGNTAESRRLKRTARRRYTRRRNRILYLQEIFTESMNEIDESFFHRLDDSFLVPEDKRGSKYPIFATLQEEKEYHKQFPTIYHLRKQLADSKEKSDVRLIYLALAHMIKYRGHFLYEETFDIKNNDIQKIFNEFINIYDNTFEGSSLSGQNAQVEAIFTDKISKSAKRERVLKLFPDEKSTGLFSEFLKLIVGNQADFKKHFDLEEKAPLQFSKDTYDEELENLLGQIGDDFADLFLIAKKLYDAILLSGILTVTDPSTKAPLSASMIERYENHQKDLAALKQFIKNNLPEKYVEVFSDQSKDGYAGYIDGKTTQEAFYKYIKNLLSKFEGADYFLDKIEREDFLRKQRTFDNGSIPHQIHLQEMNAILRRQGEHYPFLKENREKIEKILTFRIPYYVGPLARDNRDFSWLTRNSDEPIRPWNFEEVVDKARSAEDFIHRMTNYDLYLPEEKVLPKHSLLYETFAVYNELTKVKFIAEGLRDYQFLDSGQKKQIVNQLFKEKRKVTEKDIIHYLHNVDGYDGIELKGIEKQFNANLSTYHDLLKITKDKEFMDDPKNEEILENIVHTLTIFEDREMIKQRLAQYDTLFDEKVIKALTRRHYTGWGKLSAKLINGIRDKQSGKTILDYLIDDDKINRNFMQLINDDGLSFKEIIQKAQVVGKTDDVKQVVQELPGSPAIKKGILQSIKIVDELVKVMGYALESIVIEMARENQTTARGKKNSQQRYKRIEDALKNLAPNILKENPTDNIQLKNDRLFLYYLQNGKDMYTGKPLDINQLSSYDIDHIIPQAFIKDDSIDNRVLTSSKDNRGKSDNVPSLEVVQKRKAFWQQLLDSKLISERKFNNLTKAERGGLDERDKVGFIRRQLVETQQITKNVAQILDARFNTEVKEKNQKIRTVKIITLKSNLVSNFRKEFGLYKVREINNYHHAHDAYLNAVVAKAILKKYPKLEPEFVYGDYQKYDLFKPSKEIEKATEKYFFYSNLLNFFKEEVLYADGTIRKRENIEYSKDTGEIAWDKEKDFATIKKVLSYPQVNIVKKREVQTGGFSKESILPKGNSDKLIPRKTKDILWDTTKYGGFDSPVIAYSILLIADIEKGKAKKLKTVKTLVGITIMEKAAFEENPITFLENKGYHNVRKENILCLPKYSLFELENGRRRLLASAKELQKGNEIVLPVCLTTLLYHSKNLHKLDEPEHLEYIQKHRNEFKDLLNLVSEFSQKYILAEANLEKIKDLYADNEQADIEILANSFINLLTFTALGAPAAFKFFGKDVDRKRYTTVSEILNATLIHQSITGLYETRIDLSKLGEE

SEQ ID NO: 181 - protein, 1362 aa, Streptococcus sanguinis
KKPYSIGLDIGTNSVGWAVITDDYKVPSKKMKVLGNTDKHFIKKNLIGALLFDEGTTAEDRRLKRTSRRRYTRRKNRLRYLQEIFSEEISKLDSSFFHRLDDSFLVPEDKRGSKYPIFATLEEEKEYHKKFPTIYHLRKHLADSKEKTDLRLIYLALAHMIKYRGHFLYEESFDIKNNDIQKIFNEFISIYDNTFEGSSLSGQNAQVEAIFTDKISKSTKRERVLKLFSDEKSTGLFSEFLKLIVGNQADFKKHFDLEEKAPLQFSKDTYDEDLENLLGQIGDGFADLFLVAKKLYDAILLSGILTVTDPSTKAPLSASMIERYENHQEDLAALKQFIKNNLSEKYAEVFSDQSKDGYAGFIDGKTTQEAFYKYIKNLLSKLEGADYFLNKIEREDFLRKQRTFDNGSIPHQIHLQEMNAILRRQGEHYLFLKENREKIEKILAFRIPYYVGPLARGNRDFAWLTRNSDQAIRPWNFEEVVDKASSAEDFINKMTNYDLYLPEEKVLPKHSLLYETFAVYNELTKVKFIAEGLRDYQFLDSGQKKQIVNQLFKDKRKVTEKDIIHYLHNVDGYDGIELKGIEKQFNASLSTYHDLLKIIKDKEFMDNPKNGEILENIIHTLTIFEDREMIKQRLAQYDTLFDEKVIKALTRRHYTGWGKLSAKLINGIRDKQTGKTILEYLIDDGDCNRNFMQLINDDGLSFKEIIQKAQVVGKTDDVKQVVQEIPGSPAIKKGILQSIKIVDELVKVMGHNPESIVIEMARENQTTAKGKKNSQQRYKRIEDALKNLAPNILKENPTDNIQLQNDRLFLYYLQNGKDMYTGKAIDINQLSNYDIDHIIPQAFIKDDSLDNRVLTSSKDNRGKSDNVPSIEVVQKRKAFWQQLLDSKLISERKFNNLTKAKRGGLDERDKVGFIKRQLVETRQITKHVAQLLDTRFNTEVNEENQKIRTVKIITLKSNLVSNFRKEFGLYKVREINDYHHAHDAYLNAVVAKAILKKYPKLEPEFVYGDYQKYDLSKASNTIDKATEKYFFYSNLLNFFKEKVRYADGTIKKRENIEYSNDTGEIAWNKEKDFATIKKVLSLPQVNIVKKTEEQTGGLFDNNIVSKKKVVDASKLIPIKSSLSPEKYGGYARPTIAYSVLVIADIEKGKGKAKKLKRIKEIVGITIQDKKKFESNPVTYLEECGYKNINSNLIIKLPKYSLFEFNDGQRRLLASSIELQKGNELILPYHLTALLYHAQRINKISEPIHKQYVEAHQNEFKELLTTIISLSKKYIQKPNVELLLQQAFDQADKDIYQLSESFISLLKLTSFGAPGAFKFLGVEISQSSVRYKPNSQFLDTTLIHQSITGLYETRIDLSKLGED

SEQ ID NO: 182 - protein, 1360 aa, Streptococcus sp. F0441
ENKNYSIGLDIGTNSVGWSVITDDYKVPSKKMKVLGNTDKHFIKKNLIGALLFDEGTTAEARRLKRTARRRYTRRKNRLRYLQEIFSEEIGKVDSSFFHRLDDSFLIPEDKRGSKYPIFATLAEEKKYHKQFPTIYHLRKQLADSKEKTDLRLIYLALAHMIKYRGHFLYEEAFDIKNNDIQKIFNEFISIYNNTFEGNSLSGQNVQVEAIFTDKISKSAKRERVLKLFPDEKSTGLFSEFLKLIVGNQADFKKHFDLEEKAPLQFSRDTYDEDLENLLGQIGDDFADLFLVAKKLYDAILLSGILTVTNPSTKAPLSASMIERYENHQKDLASLKQFIKNNLPEKYDEVFSDQSEDGYAGYIDGKTTQETFYKYIKNLLSKFEGADYFLDKIEREDFLRKQRTFDNGSIPHQIHLQEMNAILRRQGEHYPFLKENKEKIEKILTFRIPYYVGPLARGNRDFAWLTRNSDQAIRPWNFEEIVDKASSAEDFINKMTNYDLYLPEEKVLPKHSLLYETFAVYNELTKVKFIAEGLRDYQFLDSGQKKQIVTQLFKEKRKVTEKDIIQFLHNVDGYDGIELKGIEKQFNASLSTYHDLLKIIKDKAFMDDAKNEAILENIVHTLTIFEDREMIKQRLAQYDSLFDEKVIKALTRRHYTGWGKLSAKLINGISDKQTGNTILDYLIDDGEINRNFMQLINDDGLSFKEIIQKAQVVGKTNDVKQVVQELPGSPAIKKGILQSIKIVDELVKVMGHAPESIVIEMARENQTTARGKKNSQQRYKRIEDSLKILASKILKEHPTDNIQLQNDRLFLYYLQNGKDMYTGEALDINQLSSCDIDHIIPQAFIKDDSLDNRVLTSSKDNRGKSDNVPSLEVVDKMKVFWQQLLDSKLISYRKFNNLTKAERGGLNELDKVGFIKRQLVETRQITKHVAQILDARFNKEVTEKDKKNRTVKIITLKSNLVSNFRKEFELYKVREINDYHHAHDAYLNAVVAKAILKKYPKLEPEFVYGDYQKYDLSKDPKEIEKATEKYFFYSNLLNFFKEEVHYADGTIVKRENIEYSKDTGEIAWNKEKDFATIKKVLSLPQVNIVKKREVQTGGFSKESILPKGNSDKLIPRKTKDILWDTTKYGGFDSPVIAYSILLIADIEKGKAKKLKTVKTLVGITIMEKDAFEKNPIAFLENKGYHNVCKENILCLPKYSLFELENGRRRLLASAKELQKCNEIVLPVYLTTLLYHSKNVHKLDEPGHLEYIQKHRNEFKDLLNLVSEFSQKYVLADANLEKIKNLYADNEQADIEILANSFINLLTFTALGAPAAFKFFGKDVDRKRYTTVSEILNATLIHQSITGLYETRIDLSKLGED

SEQ ID NO: 183 - protein, 1360 aa, Streptococcus sp. FF10
MKKPYSIGLDIGTNSVGWSVVTDDYKVPAKKMKVLGNTDKEYIKKNLIGALLFDSGETAEATRMKRTARRRYTRRRNRILYLQDIFSPELNQVDESFLHRLDDSFLVAEDKRGERHVIFGNIADEVKYHKEFPTIYHLRKHLADSSEKADLRLVYLALAHIIKYRGHFLIDEPIDIRNMNSQNLFKEFLLAFDGIQVDCYLASKHTDISGIITAKISKSRKVEAVLEQFPDQKKNSFFGNMVSLVFGLMPNFKSNFELDEDAKLQFSRDSYDEDLENLLGIIGDEYADVFVAAKKVYDSILLSGILTTNNHSTKAPLSASMIDRYDEHNSDKKLLRDFIRTNIGKEVFKEVFYDTSKNGYAGYIDGKTNQEDFYKYLKNLLQKVDGGDYFIEKIEREDFLRKQRTFDNGSIPHQVHLDEMKAILRRQGEFYPFLKENAEKIQQILTFKIPYYVGPLARGNSRFAWASYNSNEKMTPWNFDNVIDKTSSAQAFIERMTNNDLYLPDQKVLPKHSLLYQKFAVYNELTKIKYVTETGEARLFDVFLKKEIFDGLFKKERKVTKKKILNFLDKNFDEFRITDIQGLDNETGNFNASYGTYHDLLKIIGDKEFMDSSDNVDVLEDIVLSLTLFEDREMIKQRLLKYEDIFSKKVIANLTRRHYTGWGRLSAKLINGIKDKHSRKTILDYLIDDGHSNRNFMQLINDDNLSFKDEIANSQVIGDGDDLHQVVQELAGSPAIKKGILQSLKIVDELVKVMGYNPEQIVVEMARENQTTARGRNNSQQRLGSLTKAIQDFGSDILKRYPVENNQLQNDQLYLYYLQNGKDMYTGDTLDIHNLSQYDIDHIIPQSFIKDNSLDNRVLTNSKSNRGKSDNVPSNEVVKRMKGFWLKQLDAKLISQRKFDNLTKAERGGLSAEDKAGFIKRQLVETRQITKHVARILDERFNRDFDKNDKRIRNVKIVTLKSNLVSNFRKEFGFYKVREINNFHHAHDAYLNAVVAKALLIRYPKLEPEFVYGEYPKYNSYRERKATEKMFFYSNIMNMFKTTIKLADGRVVEKPVIEANEETGEIAWDKTKHFANVKKVLSYPQVSIVKKVEEQTGGFSKESILPKGGSDKLIARKTKNNYLSTQKYGGFDSPTVAYSIMFVADIEKGKSKRLKTVKEMIGITIMERSRFESNSVTFLEEKGYRNIRENTIIKFPKYSLFELENGRRRLLASAIELQKGNEMFLPQQFVNLLYHAQHANKEDSVIYLEKHRHELSELFHHIIGVSEKTILKPKVEMTLNEAFEKHFEFDEVSELAQSFISLLKFTAFGAPGGFKFLDADIKQSNLRYQTVTEVLSSTLIHQSVTGLYETRIDLSKLGGE

SEQ ID NO: 184 - protein, 1364 aa, Streptococcus sp. M334
SNKSYSIGLDIGTNSVGWAVITDDYKVPSKKMKVLGNTDKHFIKKNLIGALLFDEGTTAEDRRLKRTARRRYTRRKNRLRYLQEIFSQEISKVDSSFFHRLDDFFLVPEDKRGSKYPIFATLVEEKEYHKKFPTIYHLRKHLADSKEKTDLRLIYLALAHMIKYRGHFLYEESFDIKNNDIQKIFSEFISIYDNTFEGKSLSGQNAQVEAIFTDKISKSTKRERVLKLFPDEKSTGLFSEFLKLIVGNQADFKKHFDLEEKAPLQFSKDTYDEDLENLLGQIGDDFADLFLVAKKLYDAILLSGILTVKDLSTKAPLSASMIERYENHQKDLAALKQFIQNNLQEKYDEVFSDQSKDGYAGYIDGKTTQEAFYKYIKNLLSKFEGADYFLDKIEREDFLKKQRTFDNGSIPHQIHLQEMNAIIRRQGEHYPFLQENKEKIEKILTFRIPYYVGPLARGNGDFAWLTRNSDQAIRPWNFEEIVDQASSAEDFINKMTNYDLYLPEEKVLPKHSLLYETFAVYNELTKVKFIAEGLTRYQFLDKKQKKDIFDTFFKAENKRKVTEKDIIHYLHNVDGYDGIELKGIEKQFNASLSTYHDLLKIIKDKAFMDDSKNEEILENIIHTLTIFEDREMIKQRLAQYDSLFDEKVIKALTRRHYTGWGKLSAKLINGIRDKKSGKTILDYLIDDGEINRNFMQLIHDDGLSFKEIIQKAQVFGKTNDVKQVVQELPGSPAIKKGILQSIKIVDELVKVMGHAPESIVIEMARENQTTARGKKNSQQRYKRIEDSLKNLASNILKENPTDNIQLQNDRLFLYYLQNGRDMYTGKPLEINQLSNYDIDHIIPQAFIKDDSLDNRVLTSSKDNRGKSDNVPSLEVVEKMKAFWQQLLDSKLISERKFNNLTKAERERGGLNELDKVGFIKRQLVETRQITKHVAQFLDARFNKEVTEKDKKNRNVKIITLKSNLVSNFRKEFGLYKVREINDYHHAHDAYLNAVLAKAILKKYPKLEPEFVYGDYQKYDLSREPKEVEKATQKYFFYSNLLNFFKEEVHYADGTIVKRENIEYSKDTGEIAWNKEKDFATVKKVLSLPQVNIVKKTEVQTGGFSKESILPKGNSDKLIPRKTKEILWDTTKYGGFDSPVIAYSILLIADIEKGKAKKLKTVKTLVGITIMEKATFEKNPITFLENKGYHNVRKENILCLPKYSLFELESGRRRMLASAKELQKGNEIVLPVYLTTLLYHSKNVHKLDEPEHLEYIQKHRYEFKDLLNLVSEFSQKYVLADANLEKIKNLYADNEQADIEILANSFINLLTFTALGAPAAFKFLGKDVDRKRYTTVSEILNATLIHQSITGLYETRIDLSKLGED

SEQ ID NO: 185 - protein, 1360 aa, Streptococcus sp. taxon 056
NNNNYSIGLDIGTNSVGWAVITDDYKVPSKKMRVLGNTDKRFIKKNLIGALLFDEGTTAEDRRLKRTARRRYTRRKNRLRYLQEIFAEEMSKVDSSFFHRLDDSFLVPEDKSGSKYPIFATLAEEKEYHKKFPTIYHLRKHLADSKEKADLRLIYLALAHITKYRGHFLYEEAFDIKNNDIQKIFNEFINIYDNTFEGSSLSGQNAQVEAIFTGKISKSVKREHVLKLFPDEKSTGLFSEFLKLIVGNQADFKKHFDLEEKASLQFSKDTYDEDLENLLGQIGDDFADLFLVAKKLYDAILLSGILTVTDPSTKAPLSASMIERYENHQEDLAALKQFIKNNLPEKYAEVFSDQSKDGYAGYIDGKTTQEAFYKYIKNLLSKFEGADYFLDKIEREDFLRKQRTFDNGSIPHQIHLQEMNAILRRQGEHYPLLKENKEKIEKILTFRIPYYVGPLARGNRDFAWLTRNSDQAIRPWNFEEIVDKASSAESFINKMTNYDLYLPEEKVLPKHSLLYETFAVYNELTKVKFIAEGLRDYQFFDSGQKKQIVNQLFKEKRKVTEKDIIHYLHNVDGYDGIELKGIEKQFNASLSTYHDLLKIIKDKEFMDNHKNQEILENIVHTLTIFEDREMIKQRLAQYDSIFDEKVIKALTRRHYTGWGKLSAKLINGICDKKTGKTILDYLIDDGYNNRNFMQLINDDGLSFKEIIQKAQVVGKTDDLTQVVRELSGSPAIKKGILQSIKIVDELVKIMGYAPESIVIEMARENQTTAKGKKNSQQRYKRIEDALKNLAPTISKENPTDNIQLQNDRLFLYYLQNGKDMYTGEALDINQLSSYDIDHIIPQAFIKDDSLDNRVLTSSKDNRGKSDNVPSLEVVKKRKAFWQQLLDSKLISERKFNNLTKAERGGLDERDKVGFIKRQLVETRQITKHVARILDARFNTEVSEKNQKIRSVKIITLKSNLVSNFRKEFKLYKVREINDYHHAHDAYLNAVVAKAILKKYPKLEPEFVYGDYQKYDLSKDPKEVEKATEKYFFYSNLLNFFKEEVHYADGTIVKRENIEYSKDTGEIAWNKEKDFVTIKKVLSYPQVNIVKKREVQTGGFSKESILPKGNSDKLIPRKTKDILWDTTKYGGFDSPVIAYSILLIADIEKGKAKKLKTVKTLVGITIMEKAAFEKNPITFLENKGYHNVRKENILCLPKYSLFELENGRRRLLASAKELQKGNEIVLPVYLTTLLYHSKNVHKLDEPEHLEYIQKHRYEFKDLLNLVSEFSQKYVLAEANLEKIKSLYVDNEQADIEILANSFINLLTFTALGAPAAFKFFGKDVDRKRYTTVSEILNATLIHQSITGLYETRIDLSKLGED

SEQ ID NO: 186 - protein, 1359 aa, Streptococcus suis
MKKKYAIGIDIGTNSVGWSVVTDDYKVPSKKMKVFGNTEKRYIKKNLLGTLLFDEGNTAENRRLKRTARRRYTRRRNRILYLQEIFAEEINKIDDSFFQRLDDSFLIVEDKQGSKHPIFGTLQEEKKYHKQFPTIYHLRKQLADSSQKADIRLIYLALAHIIKYRGHFLFEGDLKSENKDVQHLFNDFVEMFDKTVEGSYLSENLPNVADVLVEKVSKSRRLENILHYFPNEKKNGLFGNFLALALGLQPNFKTNFELAEDAKIQFSKETYEEDLEELLGKIGDDYADLFIATKSLYDGILLAGILSTTDSTTKAPLSSSMVNRYEEHKKDLALLKNFIHQNLSDSYKEVFNDKLKDGYAGYIEGKTTQENFYRFIKKAIEKIEGSDYFIDKIDREDFLRKQRTFDNGSIPHQIHLQEMHAIIRRQAEFYPFLVENQDKIEKILTFRIPYYVGPLARGKSEFAWLNRKSDEKIRPWNFDEMVDKETSAENFITRMTNYDQYLPDQKVLPKHSLLYEKFAVYNELTKVKFIAEGMRDYQFLDSGQKKDIVKTLFKTKRKVTAKDIKAYLENSNGYAGVELKGLEEQFNASLPTYHDLLKILRDKAFIDAEENQEILEDIVLTLTLFEDREMIRKRLEKYKDILTEEQRKKLERRHYTGWGRLSAKLINGILDKVTRKTILGYLIDDGTSNRNFMQLINDDTLSFVDEIRLAQGSGEAEDYRAEVQNLAGSPAIKKGILQSLKIVDELIEVMGYDPEHIVVEMARENQFTNQGRRNSQQRYKKIENAIKNLNSKILKEYPTNNQALQNDRLFLYYLQNGKDMYTDEELDIDQLSQYDIDHIIPQAFIKDDSLDNKVLTKSAKNRGKSDDVPSLEIVHKKKNFWKQLLDSQLISQRKFDNLTKAERGGLTNEDKARFIQRQLVETRQITKHVARILDTRFNTKLDEAGNRIRDPKVNIITLKSNLVSQFRKDYQLYKVREINNYHHAHDAYLNAVVATALLKKYPQLAPEFVYGDYPKYNSYKSRKATEKVLFYSNIMNFFRRVLVYSKTGEVRIRPVIEVNKETGEIVWDKKSDFRTVRKVLSYPQVNVVKKVEMQTGGFSKESILQHGDSDKLIPRKTEKFYLDTKKYGGFDSPTIAYSVLLIADIEKGKAKKLKRVKELIGITIMERMAFEKNPIEFLEHKGYKNILEKNIIKLPKYSLFELENGRRRLLASAKELQKGNEMILPPHLVTLLYHSSNIHKITEPIHLNYVNKNKHEFKELLRHISDFSTRYILAQDRLSKIEELYDKNDGDDISDLTSSFVNLLTFTAIGAPAAFKFLGSVIDRKRYTSIAEILEATLIHQSVTGLYETRIDLSKLGGD

SEQ ID NO: 187 - protein, 1361 aa, Streptococcus suis
MKKKYAIGIDIGTNSVGWSVVTDDYKVPSKKMKVFGNTEKRYIKKNLLGTLLFDEGNTAENRRLKRTARRRYTRRRNRILYLQEIFAEEINKIDDSFFQRLDDSFLIVEDKQGSKHPIFGTLQEEKEYHKQFPTIYHLRKQLADSSQKADIRLIYLALAHIIKYRGHFLFEGDLKSENKDVQHLFNDFVEMFDKTVEGSYLSENLPNVADVLVEKVSKSRRLENILHYFPNEKKNGLFGNFLTLALGLQPNFKTNFELAEDAKIQFSKETYEEDLEELLGKIGDDYADLFIATKSLYDGILLAGILSTTDSTTKAPLSSSMVNRYEEHQKDLALLKNFIHQNLSDSYKEVFNDKLKDGYAGYIEGKTTQENFYRFIKKAIEKIEGSNYFIDKIDREDFLRKQRTFDNGSIPHQIHLQEMHAIIRRQAEFYPFLVENQDKIEKILTFRIPYYVGPLARGKSEFAWLNRKSDEKIRPWNFDEMVDKETSAENFITRMTNYDQYLPDQKVLPKHSLLYEKFAVYNELTKVRYVTEQGKSFFFDANMKQEIFDGVFKVYRKVTKEKLMDFLGKEFDEFRIVDLLGLDKDNKSFNASLGTYHDLKKIVSKDLLDNPENEDILENVVLTLTLFEDREMIRKRLEKYKDVLTEEQRKKLERRHYTGWGRLSAKLINGIRDKVTRKTILDYLIDDGTSNRNFMQLINDDTLSFVDEIRLAQGSGEAEDYRAEVQNLAGSPAIKKGILQSLKIVDELIEVMGYDPEHIVVEMARENQFTNQGRRNSQQRYKKIENAIKNLNSKILKEYPTNNQALQNDRLFLYYLQNGKDMYTDEELDIDQLSQYDIDHIIPQAFIKDDSLDNKVLTKSAKNRGKSDDVPSLEIVHKKKNFWKQLLDSQLISQRKFDNLTKAERGGLTNEDKARFIQRQLVETRQITKHVARILDTRFNTKLDEAGNRIRDPKVNIITLKSNLVSQFRKDYQLYKVREINNYHHAHDAYLNAVVATALLKKYPQLAPEFVYGDYPKYNSYKSRKATEKVLFYSNIMNFFRRVLVYSKTGEVRIRPVIEVNKETGEIVWDKKSDFRTVRKVLSYPQVNVVKKVEMQTGGFSKESILQHGDSDKLIPRKTEKFYLDTKKYGGFDSPTIAYSVLLIADIEKGKAKKLKRVKELIGITIMERMAFEKNPIEFLEHKGYKNILEKNIIKLPKYSLFELENGRRRLLASAKELQKGNEMILPPHLVTLLYHSSNIHKITEPIHLNYVNKNKHEFKELLRHISDFSTRYILAQDRLSKIEELYDKNDGDDISDLTSSFVNLLTFTAIGAPAAFKFLGSVIDRKRYTSIAEILEATLIHQSVTGLYETRIDLSKLGGD

SEQ ID NO: 188 - protein, 1361 aa, Streptococcus suis
MKKKYAIGIDIGTNSVGWSVVTDDYKVPSKKMKVFGNTEKRYIKKNLLGTLLFDEGNTAENRRLKRTARRRYTRRRNRILYLQEIFAEEINKIDDSFFQRLDDSFLIVEDKQGSKHPIFGTLQEEKEYHKQFPTIYHLRKQLADSSQKADIRLIYLALAHIIKYRGHFLFEGDLKSENKDVQHLFNDFVEMFDKTVEGSYLSENLPNVADVLVEKVSKSRRLENILHYFPNEKKNGLFGNFLALALGLQPNFKTNFELAEDAKIQFSKETYEEDLEELLGKIGDDYADLFIATKSLYDGILLAGILSTTDSTTKAPLSSSMVNRYEEHQKDLALLKNFIHQNLSDSYKEVFNDKLKDGYAGYIEGKTTQENFYRFIKKAIEKIEGSNYFIDKIDREDFLRKQRTFDNGSIPHQIHLQEMHAIIRRQAEFYPFLVENQDKIEKILTFRIPYYVGPLARGKSEFAWLNRKSDEKIRPWNFDEMVDKETSAENFITRMTNYDQYLPDQKVLPKHSLLYEKFAVYNELTKVRYVTEQGKSFFFDANMKQEIFDGVFKVYRKVTKEKLMDFLGKEFDEFRIVDLLGLDKDNKSFNASLGTYHDLKKIVSKDLLDNPENEDILENVVLTLTLFEDREMIRKRLEKYKDVLTEEQRKKLERRHYTGWGRLSAKLINGIRDKVTRKTILDYLIDDGTSNRNFMQLINDDTLSFVDEIRLAQGSGEAEDYRAEVQNLAGSPAIKKGILQSLKIVDELIEVMGYDPEHIVVEMARENQFTNQGRRNSQQRYKKIENAIKNLNSKILKEYPTNNQALQNDRLFLYYLQNGKDMYTDEELDIDQLSQYDIDHIIPQAFIKDDSLDNKVLTKSAKNRGKSDDVPSLEIVHKKKNFWKQLLDSQLISQRKFDNLTKAERGGLTNEDKARFIQRQLVETRQITKHVARILDTRFNTKLDEAGNRIRDPKVNIITLKSNLVSQFRKDYQLYKVREINNYHHAHDAYLNAVVATALLKKYPQLAPEFVYGDYPKYNSYKSRKATEKVLFYSNIMNFFRRVLVYSKTGEVRIRPVIEVNKETGEIVWDKKSDFRTVRKVLSYPQVNVVKKVEMQTGGFSKESILQHGDSDKLIPRKTEKFYLDTKKYGGFDSPTIAYSVLLIADIEKGKAKKLKRVKELIGITIMERMAFEKNPIEFLEHKGYKNILEKNIIKLPKYSLFELENGRRRLLASAKELQKGNEMILPPHLVTLLYHSSNIHKITEPIHLNYVNKNKHEFKELLRHISDFSTRYILAQDRLSKIEELYDKNDGDDISDLTSSFVNLLTFTAIGAPAAFKFLGSVIDRKRYTSIAEILEATLIHQSVTGLYETRIDLSKLGGD

SEQ ID NO: 189 - protein, 1359 aa, Streptococcus suis
MKKKYAIGIDIGTNSVGWSVVTDDYKVPSKKMKVFGNTEKRYIKKNLLGTLLFDEGNTAENRRLKRTARRRYTRRRNRILYLQEIFAEEINKIDDSFFQRLDDSFLIVEDKQGSKHPIFGTLQEEKKYHKQFPTIYHLRKQLADSSQKADIRLIYLALAHIIKYRGHFLFEGDLKSENKDVQHLFNDFVEMFDKTVEGSYLSENLPNVADVLVEKVSKSRRLENILHYFPNEKKNGLFGNFLALALGLQPNFKTNFELAEDAKIQFSKETYEEDLEELLGKIGDDYADLFIATKSLYDGILLAGILSTTDSTTKAPLSSSMVNRYEEHKKDLALLKNFIHQNLSDSYKEVFNDKLKDGYAGYIEGKTTQENFYRFIKKAIEKIEGSDYFIDKIDREDFLRKQRTFDNGSIPHQIHLQEMHAIIRRQAEFYPFLVENQDKIEKILTFRIPYYVGPLARGKSEFAWLNRKSDEKIRPWNFDEMVDKETSAENFITRMTNYDQYLPDQKVLPKHSLLYEKFAVYNELTKVKFIAEGMRDYQFLDSGQKKDIVKTLFKTKRKVTAKDIKAYLENSNGYAGVELKGLEEQFNASLPTYHDLLKILRDKAFIDAEENQEILEDIVLTLTLFEDREMIRKRLEKYKDILTEEQRKKLERRHYTGWGRLSAKLINGILDKVTRKTILGYLIDDGTSNRNFMQLINDDTLSFVDEIRLAQGSGEAEDYRAEVQNLAGSPAIKKGILQSLKIVDELIEVMGYDPEHIVVEMARENQFTNQGRRNSQQRYKKIENAIKNLNSKILKEYPTNNQALQNDRLFLYYLQNGKDMYTDEELDIDQLSQYDIDHIIPQAFIKDDSLDNKVLTKSAKNRGKSDDVPSLEIVHKKKNFWKQLLDSQLISQRKFDNLTKAERGGLTNEDKARFIQRQLVETRQITKHVARILDTRFNTKLDEAGNRIRDPKVNIITLKSNLVSQFRKDYQLYKVREINNYHHAHDAYLNAVVATALLKKYPQLAPEFVYGDYPKYNSYKSRKATEKVLFYSNIMNFFRRVLVYSKTGEVRIRPVIEVNKETGEIVWDKKSDFKTVRKVLSYPQVNVVKKVEMQTGGFSKESILQHGDSDKLIPRKTEKFYLDTKKYGGFDSPTIAYSVLLIADIEKGKAKKLKRVKELIGITIMERMAFEKNPIEFLEHKGYKNILEKNIIKLPKYSLFELENGRRRLLASAKELQKGNEMILPPHLVTLLYHSSNIHKITEPIHLNYVNKNKHEFKELLRHISDFSTRYILAQDRLSKIEELYDKNDGDDISDLTSSFVNLLTFTAIGAPAAFKFLGSVIDRKRYTSIAEILEATLIHQSVTGLYETRIDLSKLGGD

SEQ ID NO: 190 - protein, 1351 aa, Streptococcus suis
MDQKYSIGLDIGTNSVGWAVVTDDYKVPAKKMKVLGNTDKQSIKKNLLGALLFDSGETAEATRLKRTARRRYTRRRNRLRYLQEIFAEEMNKVDENFFQRLDDSFLVDEDKRGERHPIFGNIAAEVKYHDDFPTIYHLRKHLADISQKADLRLVYLALAHMIKFRGHFLIEGQLKAENTNVQALFKDFVEVYDKTVEESHLSEMTVDALSILTEKVSKSRRLENLIAHYPAEKKNTLFGNLIALSLGLQPNFKTNFQLSEDAKLQFSKDTYEEDLEGLLGEIGDEYADLFASAKNLYDAILLSGILTVDDNSTKAPLSASMVKRYEEHQKDLKKLKDFIKVNAPDQYNAIFKDKNKKGYAGYIENGVKQDEFYKYLKGILLQINGSGDFLDKIDREDFLRKQRTFDNGSIPHQIHLQEMHAILRRQEEHYPFLKENQDKIEKILTFRIPYYVGPLARKGSRFAWAEYKADEKITPWNFDDILDKEKSAEKFITRMTLNDLYLPEEKVLPKHSLLYETFTVYNELTKVKYVNEQGEAKFFDANMKQEIFDHVFKENRKVTKDKLLNYLGKEFDEFRIVDLTGLDKENKVFNSSLGTYHDLRKILDKSFLDNKENEQIIEDIIQTLTLFEDREMIRQRLQKYSDIFTKAQLKKLERCHYTGWGRLSYKLINGIRNKENKKTILDYLIDDGYANRNFMQLINDDALSFKEEIAKAQVIGETDDLNQVVSDIAGSPAIKKGILQSLKIVDELVKVMGYNPANIVIEMARENQTTDKGRRNSQQRLKLLQDSLKPVNIKNVENQQLQNDRLFLYYIQNGKDMYTGETLDINNLSQYDIDHIIPQAFIKDDSFDNRVLTSSSENRGKSDNVPSIEVVRARKADWMRLRKAGLISQRKFDNLTKAERGGLTENDKAGFIKRQLVETRQITKHVAQVLDARFNAKHDENKKVIRDVKIITLKSNLVSQFRKDFKFYKVREINDYHHAHDAYLNAVIGTALLKKYPKLASEFVYGEFKKYDVSDKEIGKATAKYFFYSNLMNFFKKEVKFADGTVVERPDIETSEDGEIAWNKQTDFKIVRKVLSYPQVNIVKKTEVQTHGLDRPSPKPKPDSSENLVGVKRNLDPKKYGGYAGISNSYAVLVKAIIEKGVKKKETMVLEFQGISILDRITFEKDKRAFLLGKGYKDIKKIIELPKYSLFELKDGSRRMLASRGEIHKGNELFVPQKFTTLLYHAKRINNPINKDHIEYVKKHRDDFKELLNYVLEFNEKYVGATKNGERLKEAVADFDSKSNEEICTSFLGLFELTSLGSASDFEFLGVKIPRYRDYTPSSLLKDSTLIHQSITGLYETRIDLSKLGED

SEQ ID NO: 191 - protein, 1256 aa, Brochothrix thermosphacta
MWGVSLFEAGKTAAERRGYRSTRRRLNHRKFRLRLLEDMFEKEILSKDPSFFIRLKEAFLSPKDEQKQFLFNDKDYTDADYYEQYKTIYHLRYDLISQHRQFDIREVYLAIHHLIKYRGHFIYEDQTFTTDGNQLQHHIKAIITMINSTLNRIIPETIDINVFEKILLDRMMNRSSKVKFLIELTGKQDKPLLKELFNLIVGLKAKPASIFEQENLATIVETMNMSTEQVQLDLLTLADVLADEEYDLLLTAQKIYSAIILDESMDGYEYFAEAKKESYRKHQEELVLVKKMLKSNAITNDERAKFEYFYTDYIGYEESKSKEERLFKHIELLLAKENVLTTVEHALLEKNITFASLLPLQRSSRNAVIPYQVHEKELVAILENQATYYPFLLEQKDNIHKLLTFRIPYYVGPLADQKDSEFAWMVRKQAGKITPFNFEEMVDIDASSEAFIKRMTNKCTYLIHEDVIPKHSFSYAKFEVLNELNKIRLDGKPIDIPLKKRIFEGLFLEKTKVTQTSLKKWLAEHEHMTVSVVQGTQKETEFATSLQAFHRFVKIFDRETVSNPANEEMFEKIIYWSTVFEDKKIMRRKLSEYPQLTEQQQVQLAQVRFRGWGRLSQRLINRIKTPEDHKLSINEILQTNENFMQIIRNKDYLFKKIIEEQFENETALLNKQRIDELAASPANKKGIWQAIKIVKELEKVLQQPAENIFIEFARSDEESKRSTPRDKFIEKAYAETDTEHLKELKQRSKQLSSQRLFLYFIQNGKCMYSGEHLDIERLDSYEVDHILPQSYIKDNSIENLALVKKVENQRKKDSLLLNSSIINQNYSRWEQLKNAGLIGEKKFRNLTRTKITDRDKEGFIARQLVETRQITKHVTQLLQQEYKDTTKVFAIKATLVSGLRRKFEFIKNRNVNDYHHAQDAFLVAFLGTNITSNYPKIEMEYLFKGYQHYLNEVGKAAKPKFTFIVENLSKQQNSTTGEVKWNPEVDIAKLKRILNFKQCNIVRKVEEQSGALFKETIYPVEESSSKTIPLKKHLDTAIYGGYTAVNYASYALIQFKKGRKLKREIIGIPLAVQTRIDNSETSLQAYIAEQIKSEVEILNGRILKYQLISNNGNRLYIAGSERHNARQLIVSDEAAKVIWLISTKQADEAMFLKYYRLEHLEAVFEELIRKQAADYQIFEKLIKKIEVNFYSCTYNEKVKVIELLKITQANATNGDLKLLKMSNREGRLGSVSVALDFKIINQSVTGLYQSIEDYNN

SEQ ID NO: 192 - protein, 1290 aa, Catenibacterium mitsuokai
IVDYCIGLDLGTGSVGWAVVDMNHRLMKRNGKHLWGSRLFSNAETAANRRASRSIRRRYNKRRERIRLLRAILQDMVLEKDPTFFIRLEHTSFLDEEDKAKYLGDNYNLFIDEDFNDYTYYHKYPTIYHLRKALCESTEKADPRLIYLALHHIVKYRGNFLYEGQKFNMDASNIEDKLSDIFTQFTSFNNIPYEDDKKNLEILEILKKPLSKKAKVDEVMTLIAPEKDYKSAFKELVTGIAGNKMNVTKMILCEPIKQGDSEIKLKFSDSNYDDQFSEVEKDLGEYVEFVDALHNVYSWVELQTIMGATHTDNASISEAMVSRYNKHHDDLKLLKDCIKNNVPNKYFDMFRNDSEKSKGYYNYINRKAPVDEFYKYVKKCIEKVDTPEAKQILNDIELENFLLKQNSRTNGSVPYQMQLDEMIKIIDNQAEYYPILKEKREQLLSILTFRIPYYFGPLETSEHAWIKRLEGKENQRILPWNYQDIVDVDATAEGFIKRMRSYCTYFPDEEVLPKNSLIVSKYEVYNELNKIRVDDKLLEVDVKNDIYNELFMKNKTVTEKKLKNWLVNNQCCSKDAEIKGFQKENQFSTSLTPWIDFTNIFGKIDQSNFDLIENIIYDLTVFEDKKIMKRRLKKKYALPDDKVKQILKLKYKDWSRLSKKLLDGIVADSVTVLDVLESRLNLMEIINDKDLGYAQMIEEATSCPEDGKFTYEEVERLAGSPALKRGIWQSLQIVEEITKVMKCRPKYIYIEFERSEEKERTESKIKKLENVYKDEQTSVLEELKGFDNTKKISSDSLFLYFTQLGKCMYSGKKLDIDSLDKYQIDHIVPQSLVKDDSFDNRVLVVPSENQRKLDDLVVPFDIRDKMYRFWKLLFDHELISPKKFYSLIKTEYTERDEERFINRQLVETRQITKNVTQIIEDHYSTTKVAAIRANLSHEFRVKNHIYKNRDINDYHHAHDAYIVALIGGFMRDRYPNMHDSKAVYSEYMKMFRNKNDQKGFVINSMNYPYEVDGKLIWNPDLINEIKKCFYYKDCYCTTKLDQKSGQLFNTVLSNDAHADKGAVVPVNKNRSDVHKYGGFSGLQYTIVAIEGQKKKGKKTELVKKISGVPLHLKAASINEKINYIEEKEGLSDVRIIKDNIPVNQMIEMDGGEYLLTSEYVNARQLVLNEKQCALIADIYNAIYKQDYDNLDDILMIQLYIELTNKMKVLYPAYRGIAEKFESYVVISKEEKANIIQMLIVMHRGPQNGNIVYDDFKISDRIGRLKTKNHNLNIVFISQSPTGIYTKKYKL

SEQ ID NO: 193 - protein, 1359 aa, Artificial Sequence; identical to SEQ ID NO: 11
  Synthetic polypeptide

SEQ ID NO: 194 - protein, 1317 aa, Clostridiales bacterium S5-A11
MKNYTIGLDIGTNSVGWAVIKDDLTLVRKKIKISGNTDKKEVKKNLWGSFLFEQGDTAQDTRVKRIARRRYERRRFRIRELQKIFDKSMGEVDSNFFHRLDESFLVEEDKEYSKYPIFSNEKEDKNYYDKYPTIYHLRKDLADSNQKADLRLIYLALAHMIKYRGHFLIEGDLKMDGISISESFQEFIDSYNEVCALEDENNDELLTQIENIFKQDISRSKKLDQAIALFQGKRQSLFGIFLTLIVGNKANFQKIFNLEDDIKLDLKEEDYDENLEELLSNIDEGYRDVFLQAKNVYNAIELSKILKTDGKETKAPLSAQMVELYNQHREDLKKYKDYIKAYLPEKYGETFKDATKNGYAGYIDGKTSQEDFYKFVKAQLKGEENGEYFLEAIENENFLRKQRSFYNGVIPYQIHLQELTAVLDQQEKHYSFLKENRDKIISLLTFRIPYYVGPLAKGESRFAWLERSNSEEKIKPWNFDKIVDIDKSAELFIENLTSRDTYLPDEPVLPKRSLIYQKFTIFNELTKISYIDERGILQNFSSREKIAIFNDLFKNKSKVTKNQLVKYIENKEQIIAPEIKGIEDSFNSNYSTYIDLSKIPDMKLLEKDEDEILEEIIKILTIFEDRKMRKRQLMKFKDKLSEKAINQLSKKHYTGWGQLSEKLINGIRDEQSNKTILDYLIDNGCPKNMNRNFMQLINDDTLSFKEKIRKAQDINQVNDIKEIVKDLPGSPAIKKGIYQSIRIVDEIIRKMKDRPKNIVIEMARENQTTQEGKNKSKARLKKIQEGLENLDSHVEKQALDEEMLKSPKYYLYCLQNGKDIYTGKDLDIGQLQTYDIDHIIPRSFITDNSFDNLVLTSSTVNRGKLDNVPSPDIVRQQKGFWKQLLRAGLMSQRKFNNLTKGKLTDRDRQQFINRQLVETRQITKHVANLLSHHLNEKKEVGEINIVLLKSALTSQFRKKFDFYKVREVNDYHHAHDAYLNGVIALKLLELYPYMAKDLIYGKYSYHRKGDKATQAKYKMSNIIERFSQDLLANPDGEIAWEKDKDLNTIRKVLSSKQINIIKKAEEGKGRLFKETINSRPSKKTEKRIPIKNNLDPNIYGGYIEEKMAYYIAINYLENGKTKKAIVGISIKDKKDFEGQTTEYLGKIGFNKASIINSFKNYTLFELENGSRRMIVGKGELQKGNQMYLPQNLLEFVYHLKHYNEDETSHKFIVEHKAYFDELLNYIVEFANKYLELENSIEKIKDLYHGKGPDVEEKELVESFINLLAITKCGPAADITFLGEKISRKRYRSTNCLWGSEVIFQSPTGLYETRLRLE

SEQ ID NO: 195 - protein, 1359 aa, Artificial Sequence; identical to SEQ ID NO: 11
  Synthetic polypeptide

SEQ ID NO: 196 - protein, 1327 aa, Dolosigranulum pigrum
MQKNYTIGLDIGTNSVGWAVMKDDYTLIRKRMKVLGNTDIKKIKKNFWGVRLFDEGETAKETRLKRGTRRRYQRRRNRLIYLQDIFQQPMLAIDENFFHRLDDSFFVPDDKSYDRHPIFGSLEEEVAYHNTYPTIYHLRKHLADNPEKADLRLVYTALAHIVKYRGHFLIEGELNTENTSISETFEQFLDTYSDIFKEQLVGDISKVEEILSSKQSRSRKHEQIMALFPNENKLGNFGRFMMLIVGNTSNFKPVFDLDDEYKLKLSDETYEEDLDTLLGMTDDVFLDVFMAAKNVYDAVEMSAIISTDTGNSKAVLSNQMINFYDEHKVDLAQLKQFFKTHLPDKYYECFSDPSKNGYAGYIDGKTNQEDFYKYIEKVMKTIKSDKKDYFLDKIDREVFLRKQRSFYNSVIPHQIHLQEMQAILDRQSQYYPFLAENRDKIESLVTFRIPYYVGPLTVSDQSEFAWMERQSDEPIRPWNFDEIVNKERSAEKFIERMTNMDTYLLEEKVLPKRSLLYQTFEVYNELTKVRYTNEQGKTEKLNRQQKAEIIETLFKQKNRVREKDIANYLEQYGYVDGTDIKGVEDKFNASLSTYNDLAKIDGAKAYLDDPEYADVWEDIIKILTIFEDKAMRKKQLQTYSDTLSPEILKKLERKHYTGWGRFSKKLINGLRDEGSNKTILDYLKDEGSSGPTNRNFMQLIRDNTLSFKKKIEDAQTIEDTTHIYDTVAELPGSPAIKKGIRQALKIVEEIIDIIGYEPENIVVEMARESQTTKKGKDLSKERLEKLTEAIKEFDGVKVKDLKNENLRNDRLYLYYLQNGRDMYTNEPLDINNLSKYDIDHIIPQSFTTDNSIDNKVLVSRTKNQGNKSDDVPSINIVHKMKPFWRQLHKAGLISDRKFKNLTKAEHGGLTEADRAHFLNRQLVETRQITKHVANLLDSQYNTAEEQRINIVLLKSSMTSRFRKEFKLYKVREINDYHHGHDAYLNAVVATTIMKVYPNLKPQFVYGQYKKTSMFKEEKATARKHFYSNITKFFKKEKVVNEETGEILWDTERHLSTIKRVLSWKQMNIVKKVEKQKGQLWKETIYPKGDSSKLIPVKEGMDPQKYGGLSQVSEAFAVVITHEKGKKKQLKSDLISIPIVDQKAYEQHPTAYLEEAGYNNPTVLHELFKYQLFELEDGSRRMIASAKEFQKGNQMVLPLELVELLYHANRYDKVKFPDSIEYVHDNLAKFDDLLEYVIDFSNKYINADKNVQKIQKIYKEHGTEDVELTVESFVNLMTFTAMGAPATFKFYGESITRSRYTSITEFRGSTLIFQSITGLYETRYKLED

SEQ ID NO: 197 - protein, 1329 aa, Artificial Sequence
  Synthetic polypeptide
MKKDYVIGLDIGTNSVGWAVMTEDYQLVKKKMPIYGNTEKKKIKKNFWGVRLFEEGHTAEDRRLKRTARRRISRRRNRLRYLQAFFEEAMTDLDENFFARLQESFLVPEDKKWHRHPIFAKLEDEVAYHETYPTIYHLRKKLADSSEQADLRLIYLALAHIVKYRGHFLIEGKLSTENISVKEQFQQFMIIYNQTFVNGESPLPESVLIEEELTEKASRTKKSEKVLQQFPQEKANGLFGQFLKLMVGNKADFKKVFGLEEEAKITYASESYEEDLEGILAKVGDEYSDVFLAAKNVYDAVELSTILADSDKKSHAKLSSSMIVRFTEHQEDLKKFKRFIRENCPDEYDNLFKNEQKDGYAGYIAHAVSQLKFYQYVKKIIQDIAGAEYFLEKIAQENFLRKQRTFDNGVIPHQIHLAELQAIIHRQAAYYPFLKENQEKIEQLVTFRIPYYVGPLSKGDASTFAWLKRQSEEPIRPWNLQETVDLDQSATAFIERMTNFDTYLPSEKVLPKHSLLYEKFMVFNELTKISYTDDRGIKANFSGKEKEKIFDYLFKTRRKVKKKDIIQFYRNEYNTEIVTLSGLEEDQFNASFSTYQDLLKCGLTRAELDHPDNAEKLEDIIKILTIFEDRQRIRTQLSTFKGQFSAEVLKKLERKHYTGWGRLSKKLINGIYDKESGKTILGYLIDDGVSKHYNRNFMQLINDSQLSFKNAIQKAQSSEHEETLSETVNELAGSPAIKKGIYQSLKIVDELVAIMGYAPKRIVVEMARENQTTSTGKRRSIQRLKIVEKAMAEIGSNLLKEQPTTNEQLRDTRLFLYYMQNGKDMYTGDELSLHRLSHYDIDHIIPQSFMKDDSLDNLVLVGSTENRGKSDDVPSKEVVKDMKAYWEKLYAAGLISQRKFQRLTKGEQGGLTLEDKAHFIQRQLVETRQITKNVAGILDQRYNANSKEKKVQIITLKASLTSQFRSIFGLYKVREVNDYHHGQDAYLNCVVATTLLKVYPNLAPEFVYGEYPKFQTFKENKATAKAIIYTNLLRFFTEDEPRFTKDGEILWSNSYLKTIKKELNYHQMNIVKKVEVQKGGFSKESIKPKGPSNKLIPVKNGLDPQKYGGFDSPIVAYTVLFTHEKGKKPLIKQEILGITIMEKTRFEQNPILFLEEKGFLRPRVLMKLPKYTLYEFPEGRRRLLASAKEAQKGNQMVLPEHLLTLLYHAKQCLLPNQSESLAYVEQHQPEFQEILERVVDFAEVHTLAKSKVQQIVKLFEANQTADVKEIAASFIQLMQFNAMGAPSTFKFFQKDIERARYTSIKEIFDATIIYQSTTGLYETRRKVVD

SEQ ID NO: 198 - protein, 1280 aa, Artificial Sequence
  Synthetic polypeptide
MRLFEEGHTAEDRRLKRTARRRISRRRNRLRYLQAFFEEAMTDLDENFFARLQESFLVPEDKKWHRHPIFAKLEDEVAYHETYPTIYHLRKKLADSSEQADLRLIYLALAHIVKYRGHFLIEGKLSTENTSVKDQFQQFMVIYNQTFVNGESPLPESVLIEEELTEKASRTKKSEKVLQQFPQEKANGLFGQFLKLMVGNKADFKKVFGLEEEAKITYASESYEEDLEGILAKVGDEYSDVFLAAKNVYDAVELSTILADSDKKSHAKLSSSMIVRFTEHQEDLKKFKRFIRENCPDEYDNLFKNEQKDGYAGYIAHAVSQLKFYQYVKKIIQDIAGAEYFLEKIAQENFLRKQRTFDNGVIPHQIHLAELQAIIHRQAAYYPFLKENQEKIEQLVTFRIPYYVGPLSKGDASTFAWLKRQSEEPIRPWNLQETVDLDQSATAFIERMTNFDTYLPSEKVLPKHSLLYEKFMVFNELTKISYTDDRGIKANFSGKEKEKIFDYLFKTRRKVKKKDIIQFYRNEYNTEIVTLSGLEEDQFNASFSTYQDLLKCGLTRAELDHPDNAEKLEDIIKILTIFEDRQRIRTQLSTFKGQFSAEVLKKLERKHYTGWGRLSKKLINGIYDKESGKTILDYLVDDGVSKHYNRNFMQLINDSQLSFKNAIQKAQSSEHEETLSETVNELAGSPAIKKGIYQSLKIVDELVAIMGYAPKRIVVEMARENQTTSTGKRRSIQRLKIVEKAMAEIGSNLLKEQPTTNEQLRDTRLFLYYMQNGKDMYTGDELSLHRLSHYDIDHIIPQSFMKDDSLDNLVLVGSTENRGKSDDVPSKEVVKDMKAYWEKLYAAGLISQRKFQRLTKGEQGGLTLEDKAHFIQRQLVETRQITKNVAGILDQRYNAKSKEKKVQIITLKASLTSQFRSIFGLYKVREVNDYHHGQDAYLNCVVATTLLKVYPNLAPEFVYGEYPKFQTFKENKATAKAIIYTNLLRFFTEDEPRFTKDGEILWSNSYLKTIKKELNYHQMNIVKKVEVQKGGFSKESIKPKGPSNKLIPVKNGLDPQKYGGFDSPVVAYTVLFTHEKGKKPLIKQEILGITIMEKTRFEQNPILFLEEKGFLRPRVLMKLPKYTLYEFPEGRRRLLASAKEAQKGNQMVLPEHLLTLLYHAKQCLLPNQSESLAYVEQHQPEFQEILERVVDFAEVHTLAKSKVQQIVKLFEANQTADVKEIAASFIQLMQFNAMGAPSTFKFFQKDIERARYTSIKEIFDATIIYQSPTGLYETRRKVVD

SEQ ID NO: 199 - protein, 1072 aa, Enterococcus durans
MDEEAKIQLSKESYEEELESLLEKSGEEFRDVFLQAKKVYDAILLSDILSTKKQNSKAKLSLGMIERYDSHKKDLEELKQFVKANLPEKTAIFFKDSSKNGYAGYIDGKTTQEDFYKFLKKELNGIAGSERFMEKVDQENFLLKQRTTANGVIPHQVHLTELKAIIERQKPYYPSLEEARDKMIRLLTFRIPYYVGPLAQGEETSSFAWLERKTPEKVTPWNATEVIDYSASAMKFIQRMINYDTYLPTEKVLPKHSILYQKYTIFNELTKVAYKDERGIKHQFSSKEKREIFKELFQKQRKVTVKKLQQFLSANYNIEDAEILGVDKAFNSSYATYHDFLDLAKPNELLEQPEMNAMFEDIVKILTIFEDREMIRTQLKKYQSVLGDGFFKKLVKKHYTGWGRLSERLINGIRDKKTNKTILDYLIDDDFPYNRNRNFMQLINDDSLSFKEELANELALAGNQSLLEVVEALLGSPAIKKGIWQTLKIVEELIEIIGYNPKNIVVEMARENQRTNRSKPRLKALEEALKSFDSPLLKEQPVDNQALQKDRLYLYYLQNGKDMYTGEALDIDRLSEYDIDHIIPRSFIVDNSIDNKVLVSSKENRLKMDDVPDQKVVIRMRRYWEKLLRANLISERKFAYLTKLELTPEDKARFIQRQLVETRQITKHVAAILDQYFNQPEESKNKGIRIITLKSSLVSQFRKTFGINKVREINNHHHAHDAYLNGVVAIALLKKYPKLEPEFVYGNYTKFNLATENKATAKKEFYSNILRFFEKEEYSYDENGEIFWDKARHIPQIKKVISSHQVNIVKKVEVQTGGFYKETVNPKGKPDKLIQRKAGWDVSKYGGFGSPVVAYAVAFIYEKGKARKKAKAIEGITIMKQSLFEQDPIGFLSNKGYSNVTKFIKLSKYTLYELENGRRRMVASKEAQKANSFILPEKLVTLLYHAQHYDEIAHKESFDYVNDHLSEFREILDQVIDFSNRYTIAAKNTEKIAELFEQNQESTVQSLSQSFINLMQLNAMGAPADFKFFDVIIPRKRYPSLTEIWESTIIYQSITGLRETRTRMATLWDGEQ

SEQ ID NO: 200 - protein, 1329 aa, Enterococcus faecalis
MKKDYVIGLDIGTNSVGWAVMTEDYQLVKKKMPIYGNTEKKKIKKNFWGVRLFEEGHTAEDRRLKRTARRRISRRRNRLRYLQAFFEEAMTDLDENFFARLQESFLVPEDKKWHRHPIFAKLEDEVAYHETYPTIYHLRKKLADSSEQADLRLIYLALAHIVKYRGHFLIEGKLSTENTSVKEQFQQFMVIYNQTFVNGESPLPESVLIEEELTEKASRTKKSEKVLQQFPQEKANGLFGQFLKLMVGNKADFKKVFGLEEEAKITYASESYEEDLEGILAKVGDEYSDVFLAAKNVYDAVELSTILADSDKKSHAKLSSSMIVRFTEHQEDLKKFKRFIRENCPDEYDNLFKNEQKDGYAGYIAHAVSQLKFYQYVKKIIQDIAGAEYFLEKIAQENFLRKQRTFDNGVIPHQIHLAELQAIIHRQAAYYPFLKENQEKIEQLVTFRIPYYVGPLSKGDASTFAWLKRQSEEPIRPWNLQETVDLDQSATAFIERMTNFDTYLPSEKVLPKHSLLYEKFMVFNELTKISYTDDRGIKANFSGKEKEKIFDYLFKTRRKVKKKDIIQFYRNEYNTEIVTLSGLEEDQFNASFSTYQDLLKCGLTRAELDHPDNAEKLEDIIKILTIFEDRQRIRTQLSTFKGQFSAEVLKKLERKHYTGWGRLSKKLINGIYDKESGKTILDYLVDDGVSKHYNRNFMQLINDSQLSFKNAIQKAQSSEHEETLSETVNELAGSPAIKKGIYQSLKIVDELVAIMGYAPKRIVVEMARENQTTSTGKRRSIQRLKIVEKAMAEIGSNLLKEQPTTNEQLRDTRLFLYYMQNGKDMYTGDELSLHRLSHYDIDHIIPQSFMKDDSLDNLVLVGSTENRGKSDDVPSKKVVKKMKAYWEKLYAAGLISQRKFQRLTKGEQGGLTLEDKAHFIQRQLVETRQITKNVAGILDQRYNAKSKEKKVQIITLKASLTSQFRSIFGLYKVREVNDYHHGQDAYLNCVVATTLLKVYPNLAPEFVYGEYPKFQAFKENKATAKTIIYTNLMRFFTEDEPRFTKDSEILWSNSYLKTIKKELNYHQMNIVKKVEVQKGGFSKESIKPKGPSNKLIPVKNGLDPQKYGGFDSPVVAYTVLFTHEKGKKPLIKQEILGITIMEKTRFEQNPILFLEEKGFLRPRVLMKLPKYTLYEFPEGRRRLLASAKEAQKGNQMVLPEHLLTLLYHAKQCLLPNQSESLAYVEQHQPEFQEILERVVDFAEVHTLAKSKVQQIVKLFEANQTADVKEIAASFIQLMQFNAMGAPSTFKFFQKDIERARYTSIKEIFDATIIYQSTTGLYETRRKVVD

SEQ ID NO: 201 - protein, 1329 aa, Enterococcus faecalis
MKKDYVIGLDIGTNSVGWAVMTEDYQLVKKKMPIYGNTEKKKIKKNFWGVRLFEEGHTAEDRRLKRTARRRISRRRNRLRYLQAFFEEAMTALDENFFARLQESFLVPEDKKWHRHPIFAKLEDEVAYHETYPTIYHLRKKLADSSEQADLRLIYLALAHIVKYRGHFLIEGKLSTENISVKEQFQQFMIIYNQTFVNGESPLPESVLIEEELTEKASRTKKSEKVLQQFPQEKANGLFGQFLKLMVGNKADFKKVFGLEEEAKITYASESYEEDLEGILAKVGDEYSDVFLAAKNVYDAVELSTILADSDKKSHAKLSSSMIVRFTEHQEDLKNFKRFIRENCPDEYDNLFKNEQKDGYAGYITHAVSQLKFYQYVKKIIQDIAGAEYFLEKIAQENFLRKQRTFDNGVIPHQIHLAELQAIIHRQAAYYPFLKENQEKIEQLVTFRIPYYVGPLSKGDANTFAWLKRQSEEPIRPWNLQETVDLDQSATAFIERMTNFDTYLPSEKVLPKHSLLYEKFMVFNELTKISYTDDRGIKANFSGKEKEKIFDYLFKTRRKVKKKDIIQFYRNEYNTEIVTLSGLEEDQFNASFSTYQDLLKCGLTRAELDHPDNAEKLEDIIKILTIFEDRQRIRTQLSTFKGQFSAEVLKKLERKHYTGWGRLSKKLINGIYDKESGKTILDYLIDDGVSKHYNRNFMQLINDSQLSFKNAIQKAQSSEHEETLSETVNELAGSPAIKKGIYQSLKIVDELVAIMGYAPKRIVVEMARENQTTSTGKRRSIQRLKIVEKAMAEIGSNLLKEQPTTNEQLRDTRLFLYYMQNGKDMYTGDELSLHRLSHYDIDHIIPQSFMKDDSLDNLVLVGSTENRGKSDDVPSKEVVKDMKAYWEKLYAAGLISQRKFQRLTKGEQGGLTLEDKAHFIQRQLVETRQITKNVAGILDQRYNAKSKEKKVQIITLKASLTSQFRSIFGLYKVREVNDYHHGQDAYLNCVVATTLLKVYPNLAPEFVYGEYPKFQTFKENKATAKAIIYTNLLRFFTEDEPRFTKDGEILWSNSYLKTIKKELNYHQMNIVKKVEVQKGGFSKESIKPKGPSNKLIPVKNGLDPQKYGGFDSPIVAYTVLFTHEKGKKPLIKQEILGITIMEKTRFEQNPILFLEEKGFLRPRVLMKLPKYTLYQFPEGRRRLLASAKEAQKGNQMVLPEHLLTLLYHAKQCLLPNQSESLAYVEQHQPEFQEILERVVDFAEVHTLAKSKVQQIVKLFEANQTADVKEIAASFIQLMQFNAMGAPSTFKFFQKDIERARYTSIKEIFDATIIYQSTTGLYETRRKVVD

SEQ ID NO: 202 - protein, 1329 aa, Enterococcus faecalis
MKKDYVIGLDIGTNSVGWAVMTEDYQLVKKKMPIYGNTEKKKIKKNFWGVRLFEEGHTAEDRRLKRTARRRISRRRNRLRYLQAFFEEAMTALDENFFARLQESFLVPEDKKWHRHPIFAKLEDEVAYHETYPTIYHLRKKLADSSEQADLRLIYLALAHIVKYRGHFLIEGKLSTENISVKEQFQQFMIIYNQTFVNGESPLPESVLIEEELTEKASRTKKSEKVLQQFPQEKANGLFGQFLKLMVGNKADFKKVFGLEEEAKITYASESYEEDLEGILAKVGDEYSDVFLAAKNVYDAVELSTILADSDKKSHAKLSSSMIVRFTEHQEDLKNFKRFIRENCPDEYDNLFKNEQKDGYAGYITHAVSQLKFYQYVKKIIQDIAGAEYFLEKIAQENFLRKQRTFDNGVIPHQIHLAELQAIIHRQAAYYPFLKENQEKIEQLVTFRIPYYVGPLSKGDASTFAWLKRQSEEPIRPWNLQETVDLDQSATAFIERMTNFDTYLPSEKVLPKHSLLYEKFMVFNELTKISYTDDRGIKANFSGKEKEKIFDYLFKTRRKVKKKDIIQFYRNEYNTEIVTLSGLEEDQFNASFSTYQDLLKCGLTRAELDHPDNAEKLEDIIKILTIFEDRQRIRTQLSTFKGQFSAEVLKKLERKHYTGWGRLSKKLINGIYDKESGKTILDYLVDDGVSKHYNRNFMQLINDSQLSFKNAIQKAQSSEHEETLSETVNELAGSPAIKKGIYQSLKIVDELVAIMGYAPKRIVVEMARENQTTSTGKRRSIQRLKIVEKAMAEIGSNLLKEQPTTNEQLRDTRLFLYYMQNGKDMYTGDELSLHRLSHYDIDHIIPQSFMKDDSLDNLVLVGSTENRGKSDDVPSKEVVKDMKAYWEKLYAAGLISQRKFQRLTKGEQGGLTLEDKAHFIQRQLVETRQITKNVAGILDQRYNAKSKEKKVQIITLKASLTSQFRSIFGLYKVREVNDYHHGQDAYLNCVVATTLLKVYPNLAPEFVYGEYPKFQTFKENKATAKAIIYTNLLRFFTEDEPRFTKDGEILWSNSYLKTIKKELNYHQMNIVKKVEVQKGGFSKESIKPKGPSNKLIPVKNGLDPQKYGGFDSPIVAYTVLFTHEKGKKPLIKQEILGITIMEKTRFEQNPILFLEEKGFLRPRVLMKLPKYTLYEFPEGRRRLLASAKEAQKGNQMVLPEHLLTLLYHAKQCLLPNQSESLAYVEQHQPEFQEILERVVDFAEVHTLAKSKVQQIVKLFEANQTADVKEIAASFIQLMQFNAMGAPSTFKFFQKDIERARYTSIKEIFDATIIYQSTTGLYETRRKVVD

SEQ ID NO: 203 - protein, 1329 aa, Enterococcus faecalis
MKKDYVIGLDIGTNSVGWAVMTEDYQLVKKKMPIYGNTEKKKIKKNFWGVRLFEEGHTAEDRRLKRTARRRISRRRNRLRYLQAFFEEAMTDLDENFFARLQESFLVPEDKKWHRHPIFAKLEDEVAYHETYPTIYHLRKKLADSSEQADLRLIYLALAHIVKYRGHFLIEGKLSTENISVKEQFQQFMIIYNQTFVNGESPLPESVLIEEELTEKASRTKKSEKVLQQFPQEKANGLFGQFLKLMVGNKADFKKVFGLEEEAKITYASESYEEDLEGILAKVGDEYSDVFLAAKNVYDAVELSTILADSDKKSHAKLSSSMIVRFTEHQEDLKKFKRFIRENCPDEYDNLFKNEQKDGYAGYIAHAVSQLKFYQYVKKIIQDIAGAEYFLEKIAQENFLRKQRTFDNGVIPHQIHLAELQAIIHRQAAYYPFLKENQEKIEQLVTFRIPYYVGPLSKGDASTFAWLKRQSEEPIRPWNLQETVDLDQSATAFIERMTNFDTYLPSEKVLPKHSLLYEKFMVFNELTKISYTDDRGIKANFSGKEKEKIFDYLFKTRRKVKKKDIIQFYRNEYNTEIVTLSGLEEDQFNASFSTYQDLLKCGLTRAELDHPDNAEKLEDIIKILTIFEDRQRIRTQLSTFKGQFSAEVLKKLERKHYTGWGRLSKKLINGIYDKESGKTILDYLVDDGVSKHYNRNFMQLINDSQLSFKNAIQKAQSSEHEETLSETVNELAGSPAIKKGIYQSLKIVDELVAIMGYAPKRIVVEMARENQTTSTGKRRSIQRLKIVEKAMAEIGSNLLKEQPTTNEQLRDTRLFLYYMQNGKDMYTGDELSLHRLSHYDIDHIIPQSFMKDDSLDNLVLVGSTENRGKSDDVPSKEVVKDMKAYWEKLYAAGLISQRKFQRLTKGEQGGLTLEDKAHFIQRQLVETRQITKNVAGILNQRYNANSKEKKVQIITLKASLTSQFRSIFGLYKVREVNDYHHGQDAYLNCVVATTLLKVYPNLAPEFVYGEYPKFQTFKENKATAKAIIYTNLLRFFTEDEPRFTKDGEILWSNSYLKTIKKELNYHQMNIVKKVEVQKGGFSKESIKPKGPSNKLIPVKNGLDPQKYGGFDSPVVAYTVLFTHEKGKKPLIKQEILGITIMEKTRFEQNPILFLEEKGFLRPRVLMKLPKYTLYEFPEGRRRLLASAKEAQKGNQMVLPEHLLTLLYHAKQCLLPNQSESLAYVEQHQPEFQEILERVVDFAEVHTLAKSKVQQIVKLFEANQTADVKEIAASFIQLMQFNAMGAPSTFKFFQKDIERARYTSIKEIFDATIIYQSTTGLYETRRKVVD

SEQ ID NO: 204 - protein, 1331 aa, Enterococcus faecalis
MKKDYVIGLDIGTNSVGWAVMTEDYQLVKKKMPIYGNTEKKKIKKNFWGVRLFEEGHTAEDRRLKRTARRRISRRRNRLRYLQAFFEEAMTALDENFFARLQESFLVPEDKKWHRHPIFAKLEDEVAYHETYPTIYHLRKKLADSSEQADLRLIYLALAHIVKYRGHFLIEGKLSTENISVKEQFQQFMIIYNQTFVNGESPLPESVLIEEELTEKASRTKKSEKVLQQFPQEKANGLFGQFLKLMVGNKADFKKVFGLEEEAKIKITYASESYEEDLEGILAKVGDEYSDVFLAAKNVYDAVELSTILADSDKKSHAKLSSSMIVRFTEHQEDLKNFKRFIRENCPDEYDNLFKNEQKDGYAGYIAHAVSQLKFYQYVKKIIQDIAGAEYFLEKIAQENFLRKQRTFDNGVIPHQIHLAELQAIIHRQAAYYPFLKENQKKIEQLVTFRIPYYVGPLSKGDASTFAWLKRQSEEPIRPWNLQETVDLDQSATAFIERMTNFDTYLPSEKVLPKHSLLYEKFMVFNELTKISYTDDRGIKANFSGKEKEKIFDYLFKTRRKVKKKDIIQFYRNEYNTEIVTLSGLEEDQFNASFSTYQDLLKCGLTRAELDHPDNAEKLEDIIKILTIFEDRQRIRTQLSTFKGQFSEEVLKKLERKHYTGWGRLSKKLINGIYDKESGKTILDYLIDDGVSKHYNRNFMQLINDSQLSFKNAIQKAQSSEHEETLSETVNELAGSPAIKKGIYQSLKIVDELVAIMGYAPKRIVVEMARENQTTSTGKRRSIQRLKIVEKAMAEIGSNLLKEQPTTNEQLRDTRLFLYYMQNGKDMYTGDELSLHRLSHYDIDHIIPQSFMKDDSLDNLVLVGSTENRGKSDDVPSKEVVKKMKAYWEKLYAAGLISQRKFQRLTKGEQGGLTLEDKAHFIQRQLVETRQITKNVAGILDQRYNAKSKEKKVQIITLKASLTSQFRSIFGLYKVREVNDYHHGQDAYLNCVVATTLLKVYPNLAPEFVYGEYPKFQAFKENKATAKAIIYTNLLRFFTEDEPRFTKDGEILWSNSYLKTIKKELNYHQMNIVKKVEVQKGGFSKESIKPKGPSNKLIPVKNGLDPQKYGGFDSPVVAYTVLFTHEKGKKPLIKQEILGITIMEKTRFEQNPILFLEEKGFLRPRVLMKLPKYTLYEFPEGRRRLLASAKEAQKGNQMVLPEHLLTLLYHAKQCLLPNQSESLAYVEQHQPEFQEILERVVDFAEVHTLAKSKVQQIVKLFEANQTADVKEIAASFIQLMQFNAMGAPSTFKFFQKDIERARYTSIKEIFDATIIYQSTTGLYETRRKVVD

SEQ ID NO: 205 - protein, 1329 aa, Enterococcus faecalis
MKKDYVIGLDIGTNSVGWAVMTEDYQLVKKKMPIYGNTEKKKIKKNFWGVRLFEEGHTAEDRRLKRTARRRISRRRNRLRYLQAFFEEAMTALDENFFARLQESFLVPEDKKWHRHPIFAKLEDEVAYHETYPTIYHLRKKLADSSEQADLRLIYLALAHIVKYRGHFLIEGKLSTENISVKEQFQQFMIIYNQTFVNGESPLPESVLIEEELTEKASRTKKSEKVLQQFPQEKANGLFGQFLKLMVGNKADFKKVFGLEEEAKITYASESYEEDLEGILAKVGDEYSDVFLAAKNVYDAVELSTILADSDKKSHAKLSSSMIVRFTEHQEDLKKFKRFIRENCPDEYDNLFKNEQKDGYAGYIAHAVSQLKFYQYVKKIIQDIAGAEYFLEKIAQENFLRKQRTFDNGVIPHQIHLAELQAIIHRQAAYYPFLKENQEKIEQLVTFRIPYYVGPLSKGDASTFAWLKRQSEEPIRPWNLQETVDLDQSATAFIERMTNFDTYLPSEKVLPKHSLLYEKFMVFNELTKISYTDDRGIKANFSGKEKEKIFDYLFKTRRKVKKKDIIQFYRNEYNTEIVTLSGLEEDQFNASFSTYQDLLKCGLTRAELDHPDNAEKLEDIIKILTIFEDRQRIRTQLSTFKGQFSAEVLKKLERKHYTGWGRLSKKLINGIYDKESGKTILGYLIDDGVSKHYNRNFMQLINDSQLSFKNAIQKAQSSEHEETLSETVNELAGSPAIKKGIYQSLKIVDELVAIMGYAPKRIVVEMARENQTTSTGKRRSIQRLKIVEKAMAEIGSNLLKEQPTTNEQLRDTRLFLYYMQNGKDMYTGDELSLHRLSHYDIDHIIPQSFMKDDSLDNLVLVGSTENRGKSDDVPSKEVVKDMKAYWEKLYAAGLISQRKFQRLTKGEQGGLTLEDKAHFIQRQLVETRQITKNVAGILDQRYNAKSKEKKVQIITLKASLTSQFRSIFGLYKVREVNDYHHGQDAYLNCVVATTLLKVYPNLAPEFVYGEYPKFQTFKENKATAKAIIYTNLLRFFTEDEPRFTKDGEILWSNSYLKTIKKELNYHQMNIVKKVEVQKGGFSKESIKPKGPSNKLIPVKNGLDPQKYGGFDSPIVAYTVLFTHEKGKKPLIKQEILGITIMEKTRFEQNPILFLEEKGFLRPRVLMKLPKYTLYEFPEGRRRLLASAKEAQKGNQMVLPEHLLTLLYHAKQCLLPNQSESLAYVEQHQPEFQEILERVVDFAEVHTLAKSKVQQIVKLFEANQTADVKEIAASFIQLMQFNAMGAPSTFKFFQKDIERARYTSIKEIFDATIIYQSTTGLYETRRKVVD

SEQ ID NO: 206 - protein, 1329 aa, Enterococcus faecalis
MKKDYVIGLDIGSNSVGWAVMTEDYQLVKKKMPIYGNTEKKKIKKNFWGVRLFEEGHTAEDRRLKRTARRRISRRRNRLRYLQAFFEEAMTDLDENFFARLQESFLVPEDKKWHRHPIFAKLEDEVAYHETYPTIYHLRKKLADSSEQADLRLIYLALAHIVKYRGHFLIEGKLSTENTSVKDQFQQFMVIYNQTFVNGESPLPESVLIEEELTEKASRTKKSEKVLQQFPQEKANGLFGQFLKLMVGNKADFKKVFGLEEEAKITYASESYEEDLEGILAKVGDEYSDVFLAAKNVYDAVELSTILADSDKKSHAKLSSSMIVRFTEHQEDLKNFKRFIRENCPDEYDNLFKNEQKDGYAGYITHAVSQLKFYQYVKKIIQDIAGAEYFLEKIAQENFLRKQRTFDNGVIPHQIHLAELQAIIHRQAAYYPFLKENQEKIEQLVTFRIPYYVGPLSKGDASTFAWLKRQSEEPIRPWNLQETVDLDQSATAFIERMTNFDTYLPSEKVLPKHSLLYEKFMVFNELTKISYTDDRGIKANFSGKEKEKIFDYLFKTRRKVKKKDIIQFYRNEYNTEIVTLSGLEEDQFNASFSTYQDLLKCGLTRAELDHPDNAEKLEDIIKILTIFEDRQRIRTQLSTFKGQFSAEVLKKLERKHYTGWGRLSKKLINGIYDKESGKTILDYLIDDGVSKHYNRNFMQLINDSQLSFKNAIQKAQSSEHEETLSETVNELAGSPAIKKGIYQSLKIVDELVAIMGYAPKRIVVEMARENQTTSTGKRRSIQRLKIVEKAMAEIGSNLLKEQPTTNEQLRDTRLFLYYMQNGKDMYTGDELSLHRLSHYDIDHIIPQSFMKDDSLDNLVLVGSTENRGKSDDVPSKEVVKDMKAYWEKLYAAGLISQRKFQRLTKGEQGGLTLEDKAHFIQRQLVETRQITKNVAGILDQLYNAKSKEKKVQIITLKASLTSQFRSIFGLYKVREVNDYHHGQDAYLNCVVATTLLKVYPNLAPEFVYGEYPKFQTFKENKATAKTIIYTNLMRFFTEDEPRFTKDGEILWSNSYLKTIKKELNYHQMNIVKKVEVQKGGFSKESIKPKGPSNKLIPVKNGLDPQKYGGFDSPVVAYTVLFTHEKGKKPLIKQEILGITIMEKTRFEQNPILFLEEKGFLRPRVLMKLPKYTLYEFPEGRRRLLASAKEAQKGNQMVLPEHLLTLLYHAKQCLLPNQSESLAYVEQHQPEFQEILERVVDFAEVHTLAKSKVQQIVKLFEANQTADVKEIAASFIQLMQFNAMGAPSTFKFFQKDIERARYTSIKEIFDATIIYQSTTGLYETRRKVVD

SEQ ID NO: 207 - protein, 1329 aa, Enterococcus faecalis
MKKDYVIGLDIGTNSVGWAVMTEDYQLVKKKMPIYGNTEKKKIKKNFWGVRLFEEGHTAEDRRLKRTARRRISRRRNRLRYLQAFFEEAMTALDENFFARLQESFLVPEDKKWHRHPIFAKLEDEVAYHETYPTIYHLRKKLADSSEQADLRLIYLALAHIVKYRGHFLIEGKLSTENISVKEKFQQFMIIYNQTFVNGEGPLPESVLIEEELTEKASRTKKSEKVLQQFPQEKANGLFGQFLKLMVGNKADFKKVFGLEEEAKITYASESYEEDLEGILAKVGDEYSDVFLAAKNVYDAVELSTILADSDKKSYAKLSSSMIVRFTEHQEDLKKFKRFIRENCPDEYDNLFKNEQKDGYAGYIAHAVSQLKFYQYVKKIIQDIAGAEYFLEKIAQENFLRKQRTFDNGVIPHQIHLAELQAIIHRQAAYYPFLKENQEKIEQLVTFRIPYYVGPLSKGDASTFAWLKRQSEEPIRPWNLQETVDLDQSATAFIERMTNFDTYLPSEKVLPKHSLLYEKFMVFNELTKISYTDDRGIKANFSGKEKEKIFDYLFKTRRKVKKKDIIQFYRNEYNTEIVTLSGLEEDQFNASFSTYQDLLKCGLTRAELDHPDNAEKLEDIIKILTIFEDRQRIRTQLSTFKGQFSAEVLKKLERKHYTGWGRLSKKLINGIYDKESGKTILDYLVDDGVSKHYNRNFMQLINDSQLSFKNAIQKAQSSEHEETLSETVNELAGSPAIKKGIYQSLKIVDELVAIMGYAPKRIVVEMARENQTTSTGKRRSIQRLKIVEKAMAEIGSNLLKEQPTTNEQLRDTRLFLYYMQNGKDMYTGDELSLHRLSHYDIDHIIPQSFMKDDSLDNLVLVGSTENRGKSDDVPSKEVVKDMKAYWEKLYAAGLISQRKFQRLTKGEQGGLTLEDKAHFIQRQLVETRQITKNVAGILDQRYNAKSKEKKVQIITLKASLTSQFRSIFGLYKVREVNDYHHGQDAYLNCVVATTLLKVYPNLAPEFVYGEYPKFQTFKENKATAKAIIYTNLLRFFTEDEPRFTKDGEILWSNSYLKTIKKELNYHQMNIVKKVEVQKGGFSKESIKPKGPSNKLIPVKNGLDPQKYGGFDSPIVAYTVLFTHEKGKKPLIKQEILGITIMEKTRFEQNPILFLEEKGFLRPRVLMKLPKYTLYEFPEGRRRLLASAKEAQKGNQMVLPEHLLTLLYHAKQCLLPNQSESLAYVEQHQPEFQEILERVVDFAEVHTLAKSKVQQIVKLFEANQTADVKEIAASFIQLMQFNAMGAPSTFKFFQKDIERARYTSIKEIFDATIIYQSTTGLYETRRKVVD

SEQ ID NO: 208 - protein, 1329 aa, Enterococcus faecalis
MKKDYVIGLDIGTNSVGWAVMTEDYQLVKKKMPIYGNTEKKKIKKNFWGVRLFEEGHTAEDRRLKRTARRRISRRRNRLRYLQAFFEEAMTALDENFFARLQESFLVPEDKKWHRHPIFAKLEDEVAYHETYPTIYHLRKKLADSSEQADLRLIYLALAHIVKYRGHFLIEGKLSTENISVKDQFQQFMVIYNQTFVNGESPLPESVLIEEELTEKASRTKKSEKVLQQFPQEKANGLFGQFLKLMVGNKADFKKVFGLEEEAKITYASESYEEDLEGILAKVGDEYSDVFLAAKNVYDAVELSTILADSDKKSHAKLSSSMIVRFTEHQEDLKNFKRFIRENCPDEYDNLFKNEQKDGYAGYIAHAVSQLKFYQYVKKIIQDIAGAEYFLEKIAQENFLRKQRTFDNGVIPHQIHLAELQAIIHRQAAYYPFLKENQKKIEQLVTFRIPYYVGPLSKGDASTFAWLKRQSEEPIRPWNLQETVDLDQSATAFIERMTNFDTYLPSEKVLPKHSLLYEKFMVFNELTKISYTDDRGIKANFSGKEKEKIFDYLFKTRRKVKKKDIIQFYRNEYNTEIVTLSGLEEDQFNASFSTYQDLLKCGLTRAELDHPDNAEKLEDIIKILTIFEDRQRIRTQLSTFKGQFSAEVLKKLERKHYTGWGRLSKKLINGIYDKESGKTILDYLIDDGVSKHYNRNFMQLINDSQLSFKNAIQKAQSSEHEETLSETVNELAGSPAIKKGIYQSLKIVDELVAIMGYAPKRIVVEMARENQTTSTGKRRSIQRLKIVEKAMAEIGSNLLKEQPTTNEQLRDTRLFLYYMQNGKDMYTGDELSLHRLSHYDIDHIIPQSFMKDDSLDNLVLVGSTENRGKSDDVPSKEVVKKMKAYWEKLYAAGLISQRKFQRLTKGEQGGLTLEDKAHFIQRQLVETRQITKNVAGILDQRYNAKSKEKKVQIITLKASLTSQFRSIFGLYKVREVNDYHHGQDAYLNCVVATTLLKVYPNLAPEFVYGEYPKFQAFKENKAMAKAIIYTNLLRFFTEDEPRFTKDGEILWSNSYLKTIKKELNYHQMNIVKKVEVQKGGFSKESIKPKGPSNKLIPVKNGLDPQKYGGFDSPVVAYTVLFTHEKGKKPLIKQEILGITIMEKTRFEQNPILFLEEKGFLRPRVLMKLPKYTLYEFPEGRRRLLASAKEAQKGNQMVLPERLLTLLYHAKQCLLPNQSESLAYVEQHQPEFQEILERVVDFAEVHTLAKSKVQQIVKLFEANQTADVKEIAASFIQLMQFNAMGAPSTFKFFQKDIERARYTSIKEIFDATIIYQSTTGLYETRRKVVD

SEQ ID NO: 209 - protein, 1329 aa, Enterococcus faecalis
MKKDYVIGLDIGTNSVGWAVMTEDYQLVKKKMPIYGNTEKKKIKKNFWGVRLFEEGHTAEDRRLKRTARRRISRRRNRLRYLQAFFEEAMTALDENFFARLQESFLVPEDKKWHRHPIFAKLEDEVAYHETYPTIYHLRKKLADSSEQADLRLIYLALAHIVKYRGHFLIEGKLSTENISVKEQFQQFMIIYNQTFVNGESPLPESVLIEEELTEKASRTKKSEKVLQQFPQEKANGLFGQFLKLMVGNKADFKKVFGLEEEAKITYASESYEEDLEGILAKVGDEYSDVFLAAKNVYDAVELSTILADSDKKSHAKLSSSMIVRFTEHQEDLKKFKRFIRENCPDEYDNLFKNEQKDGYAGYIAHAVSQLKFYQYVKKIIQDIAGAEYFLEKIAQENFLRKQRTFDNGVIPHQIHLAELQAIIHRQAAYYPFLKENQEKIEQLVTFRIPYYVGPLSKGDASTFAWLKRQNEKPIRPWNLQETVDLDQSATAFIERMTNFDTYLPSEKVLPKHSLLYEKFMVFNELTKISYTDDRGIKANFSGKEKEKIFDYLFKTRRKVKKKDIIQFYRNEYNTEIVTLSGLEEDQFNASFSTYQDLLKCGLTRAELDHPDNAEKLEDIIKILTIFEDRQRIRTQLSTFKGQFSAEVLKKLERKHYTGWGRLSKKLINGIYDKESGKTILDYLIDDGVSKHYNRNFMQLINDSQLSFKNAIQKAQSSEHEETLSETVNELAGSPAIKKGIYQSLKIVDELVAIMGYAPKRIVVEMARENQTTSTGKRRSIQRLKIVEKAMAEIGSNLLKEQPTTNEQLRDTRLFLYYMQNGKDMYTGDELSLHRLSHYDIDHIIPQSFMKDDSLDNLVLVGSTENRGKSDDVPSKEVVKKMKAYWEKLYAAGLISQRKFQRLTKGEQGGLTLEDKAHFIQRQLVETRQITKNVAGILDQRYNAKSKEKKVQIITLKASLTSQFRSIFGLYKVREVNDYHHGQDAYLNCVVATTLLKVYPNLAPEFVYGEYPKFQAFKENKATAKAIIYTNLMRFFTEVEPRFTKDGEILWSNSYLKTIKKELNYHQMNIVKKVEVQKGGFSKESIKPKGPSNKLIPVKNGLDPQKYGGFDSPVVAYTVLFTHEKGKKPLIKQEILGITIMEKTKFEQNPILFLEEKGFLRPRVLMKLPKYTLYEFPEGRRRLLASAKEAQKGNQMVLPEHLLTLLYHAKQCLLPNQSESLAYVEQHQPEFQEILERVVDFAEVHTLAKSKVQQIVKLFETNQTADVKEIAASFIQLMQFNAMGAPSTFKFFQKDIERARYTSIKEIFDATIIYQSTTGLYETRRKVVD

SEQ ID NO: 210 - protein, 1329 aa, Enterococcus faecalis
MKKDYVIGLDIGTNSVGWAVMTEDYQLVKKKMPIYGNTEKKKIKKNFWGVRLFEEGHTAEDRRLKRTARRRISRRRNRLRYLQAFFEEAMTALDENFFARLQESFLVPEDKKWHRHPIFAKLEDEVAYHETYPTIYHLRKKLADSSEQADLRLIYLALAHIVKYRGHFLIEGKLSTENISVKEQFQQFMIIYNQTFVNGESPLPESVLIEEELTEKASRTKKSEKVLQQFPQEKANGLFGQFLKLMVGNKADFKKVFGLEEEAKITYASESYEEDLEGILAKVGDEYSDVFLAAKNVYDAVELSTILADSDKKSHAKLSSSMIVRFTEHQEDLKNFKRFIRENCPDEYDNLFKNEQKDGYAGYIAHAVSQLKFYQYVKKIIQDIAGAEYFLEKIAQENFLRKQRTFDNGVIPHQIHLAELQAIIHRQAAYYPFLKENQKKIEQLVTFRIPYYVGPLSKGDASTFAWLKRQSEEPIRPWNLQETVDLDQSATAFIERMTNFDTYLPSEKVLPKHSLLYEKFMVFNELTKISYTDDRGIKANFSGKEKEKIFDYLFKTRRKVKKKDIIQFYRNEYNTEIVTLSGLEEDQFNASFSTYQDLLKCGLTRAELDHPDNAEKLEDIIKILTIFEDRQRIRTQLSTFKGQFSEEVLKKLERKHYTGWGRLSKKLINGIYDKESGKTILDYLIDDGVSKHYNRNFMQLINDSQLSFKNAIQKAQSSEHEETLSETVNELAGSPAIKKGIYQSLKIVDELVAIMGYAPKRIVVEMARENQTTSTGKRRSIQRLKIVEKAMAEIGSNLLKEQPTTNEQLRDTRLFLYYMQNGKDMYTGDELSLHRLSHYDIDHIIPQSFMKDDSLDNLVLVGSTENRGKSDDVPSKEVVKKMKAYWEKLYAAGLISQRKFQRLTKGEQGGLTLEDKAHFIQRQLVETRQITKNVAGILDQRYNAKSKEKKVQIITLKASLTSQFRSIFGLYKVREVNDYHHGQDAYLNCVVATTLLKVYPNLAPEFVYGEYPKFQAFKENKATAKAIIYTNLLRFFTEDEPRFTKDGEILWSNSYLKTIKKELNYHQMNIVKKVEVQKGGFSKESIKPKGPSNKLIPVKNGLDPQKYGGFDSPVVAYTVLFTHEKGKKPLIKQEILGITIMEKTRFEQNPILFLEEKGFLRPRVLMKLPKYTLYEFPEGRRRLLASAKEAQKGNQMVLPEHLLTLLYHAKQCLLPNQSESLAYVEQHQPEFQEILERVVDFAEVHTLAKSKVQQIVKLFEANQTADVKEIAASFIQLMQFNAMGAPSTFKFFQKDIERARYTSIKEIFDATIIYQSTTGLYETRRKVVD

SEQ ID NO: 211 - protein, 1328 aa, Enterococcus faecium
MKKEYTIGLDIGTNSVGWSVLTDDYRLVSKKMKVAGNTEKSSTKKNFWGVRLFDEGQTAEARRSKRTARRRLARRRQRILELQKIFAPEILKIDEHFFARLNESFLVLDEKKQSRHPVFATIKQEKSYHQTYPTIYHLRQALADSSEKADIRLVYLAMAHLLKYRGHFLIEGELNTENSSVTETFRQFLSTYNQQFSEADKLDEAVDCSFVFTEKMSKTKKAETLLKYFPHEKSNGYLSQFIKLMVGNQGNFKNVFGLEEAKLQFSKETYEEDLEELLEKIGDDYIDLFVQAKNVYDAVLLSEILSDSTKNTRAKLSAGMIRRYDAHKEDLVLLKRFVKENLPKKYRAFFGDNSVNGYAGYIEGHATQEDFYKFVKKELTGIRGSEVFLTKIEQENFLRKQRTFDNGVIPHQIHLTELRAIIANQKKHYPFLKEEQEKLESLLTFKIPYYVGPLAKKQENSPFAWLIRKSEEKIKPWNLPEIVDMEGSAVRFIERMINTDMYMPHNKVLPKNSLLYQKFSIYNELTKVRYQDERGQMNYFSSIEKKEIFHELFEKNRKVTKKDLQEFLYLKYDIKHAELSGIEKAFNASYTTYHDFLTMSENKQWLEDPELASMFEEIIKTLTVFEDREMIKTRLSHHEATLGKHIIKKLTKKHYTGWGRLSKELIQGIRDKQSNKTILDYLIDDDFPHHRNRNFMQLINDDSLSFKKEIKKAQMITDTENLEEIVKELTGSPAIKKGILQSLKIVDEIVGIMGYEPANIVVEMARENQTTGRGLKSSRPRLKALEESLKDFGSQLLKEYPTDNSSLQKDRLYLYYLQNGRDMYTGAPLDIHRLSDYDIDHIIPRSFTTDNSIDNKVLVSSKENRLKKDDVPSEKVVKKMRSFWYDLYSSKLISKRKLDNLTKIKLTEEDKAGFIKRQLVETRQITKHVAGILHHRFNKAEDTNEPIRKVRIITLKSALVSQFRNRFGIYKVREINEYHHAHDAYLNGVVALALLKKYPQLAPEFVYGEYLKFNAHKANKATVKKEFYSNIMKFFESDTPVCDENGEIFWDKSKSIAQVKKVINHHHMNIVKKTEIQKGGFSKETVEPKKDSSKLLPRKNNWDPAKYGGLGSPNVAYTVAFTYEKGKARKRTNALEGITIMEREAFEQSPVLFLKNKGYEQAEIEMKLPKYALFELENGRKRMVASKEAQKANSFLLPEHLVTLLYHAKQYDEISHKESFDYVNEHHKEFSEVFARVLEFAGKYTLAEKNIEKLEKIYKENQTDDLAKLASSFVNLMQFNAMGAPADFKFFDVTIPRKRYTSLTEIWQSTIIHQSITGLYETRIRMGK

SEQ ID NO: 212 - protein, 1329 aa, Enterococcus faecium
MKKEYTIGLDIGTNSVGWSVLTDDYRLVSKKMKVAGNTEKSSTKKNFWGVRLFDEGQTAEARRSKRTARRRLARRRQRILELQKIFAPEILKIDEHFFARLNESFLVPDEKKQSRHPVFATIKQEKSYHQTYPTIYHLRQALADSSEKADIRLVYLAMAHLLKYRGHFLIEGELNTENSSVTETFRQFLSTYNQQFSEAGKLDEAVDCSFVFTEKMSKTKKAETLLKYFPHEKSNGYLSQFIKLMVGNQGNFKNVFGLEEEAKLQFSKETYEEDLEELLEKIGDDYIDLFVQAKNVYDAVLLSEILSDSTKNTRAKLSAGMIRRYDAHKEDLVLLKRFVKENLPKKYRAFFGDNSVNGYAGYIEGHATQEAFYKFVKKELTGIRGSEVFLTKIEQENFLRKQRTFDNGVIPHQIHLSELRAIIANQKKHYPFLKEEQEKLESLLTFKIPYYVGPLAKKQENSPFAWLIRKSEEKIKPWNLPEIVDMEGSAVRFIERMINTDMYMPHNKVLPKNSLLYQKFSIYNELTKVRYQDERGQMNYFSSIEKKEIFHELFEKNRKVTKKDLQEFLYLKYDIKHAELSGIEKAFNASYTTYHDFLTMSENKQWLEDPELASMFEEIIKTLTVFEDREMIKTRLSHHEATLGKHIIKKLTKKHYTGWGRLSKELIQGIRDKQSNKTILDYLIDDDFPHHRNRNFMQLINDDSLSFKKEIKKAQMITDTENLEEIVKELTGSPAIKKGILQSLKIVDEIVGIMGYEPANIVVEMARENQTTGRGLKSSRPRLKALEESLKDFGSQLLKEYPTDNSSLQKDRLYLYYLQNGRDMYTGAPLDIHRLSDYDIDHIIPRSFTTDNSIDNKVLVSSKENRLKKDDVPSEKVVKKMRSFWYDLYSSKLISKRKLDNLTKIKLTEEDKAGFIKRQLVETRQITKHVAGILHHRFNKAEDTNDPIRKVRIITLKSALVSQFRNRFGIYKVREINEYHHAHDAYLNGVVALALLKKYPQLAPEFVYGEYLKFNAHKANKATVKKEFYSNIMKFFESDTPVCDENGEIFWDKSKSIAQVKKVINHHHMNIVKKTEIQKGGFSKETVEPKKDSSKLLPRKNNWDPAKYGGLGSPNVAYTVAFTYEKGKARKRTNALEGITIMEREAFEQSPVLFLKNKGYEQAEIEMKLPKYALFELENGRKRMVASKEAQKANSFLLPEHLVTLLYHAKQYDEISHKESFDYVNEHHKEFSEVFARVLEFAGKYTLAEKNIEKLEKIYKENQTDDLAKLASSFVNLMQFNAMGAPADFKFFDVTIPRKRYTSLTEIWQSTIIHQSITGLYETRIRMGK

SEQ ID NO: 213 - protein, 1329 aa, Enterococcus faecium
MKKEYTIGLDIGTNSVGWSVLTDDYRLVSKKMKVAGNTEKSSTKKNFWGVRLFDEGQTAEARRSKRTARRRLARRRQRILELQKIFAPEILKIDEHFFARLNESFLVLDEKKQSRHPVFATIKQEKSYHQTYPTIYHLRQALADSSEKADIRLVYLAMAHLLKYRGHFLIEGELNTENSSVTETFRQFLSTYNQQFSEADKLDEAVDCSFVFTEKMSKTKKAETLLKYFPHEKSNGYLSQFIKLMVGNQGNFKNVFGLEEEAKLQFSKETYEEDLEELLEKIGDDYIDLFVQAKNVYDAVLLSEILSDSTKNTRAKLSAGMIRRYDAHKEDLVLLKRFVKENLPKKYRAFFGDNSVNGYAGYIEGHATQEDFYKFVKKELTGIRGSEVFLTKIEQENFLRKQRTFDNGVIPHQIHLTELRAIIANQKKHYPFLKEEQEKLESLLTFKIPYYVGPLAKKQENSPFAWLIRKSEEKIKPWNLPEIVDMEGSAVRFIERMNNTDMYIPHNKVLPKNSLLYQKFSIYNELTKVRYQDERGQMNYFSSIEKKEIFHELFEKNRKVTKKDLQEFLYLKYDIKHAELSGIEKAFNASYTTYHDFLTMSENKQWLEDPELASMFEEIIKTLTVFEDREMIKTRLSHHEATLGKHIIKKLTKKHYTGWGRLSKELIQGIRDKQSNKTILDYLIDDDFPHHRNRNFMQLINDDSLSFKKEIKKAQMITDTENLEEIVKELTGSPAIKKGILQSLKIVDEIVGIMGYEPANIVVEMARENQTTGRGLKSSRPRLKALEESLKDFGSQLLKEYPTDNSSLQKDRLYLYYLQNGRDMYTGAPLDIHRLSDYDIDHIIPRSFTTDNSIDNKVLVSSKENRLKKDDVPSEKVVKKMRSFWYDLYSSKLISKRKLDNLTKIKLTEEDKAGFIKRQLVETRQITKHVAGILHHRFNKAEDTNEPIRKVRIITLKSALVSQFRNRFGIYKVREINEYHHAHDAYLNGVVALALLKKYPQLAPEFVYGEYLKFNAHKANKATVKKEFYSNIMKFFESDTPVCDENGEIFWDKSKSIAQVKKVINHHHMNIVKKTEIQKGGFSKETVEPKKDSSKLLPRKNNWDPAKYGGLGSPNVAYTVAFTYEKGKARKRTNALEGITIMEREAFEQSPVLFLKNKGYEQAEIEMKLPKYALFELENGRKRMVASKEAQKANSFLLPEHLVTLLYHAKQYDEISHKESFDYVNEHHKEFSEVFARVLEFAGKYTLAEKNIEKLEKIYKENQTDDLAKLASSFVNLMQFNAMGAPADFKFFDVTIPRKRYTSLTEIWQSTIIHQSITGLYETRIRMGK

SEQ ID NO: 214 - protein, 1329 aa, Enterococcus faecium
MKKEYTIGLDIGTNSVGWSVLTDDYRLVSKKMKVAGNTEKSSTKKNFWGVRLFDEGQTAEARRSKRTARRRLARRRQRILELQKIFAPEILKIDEHFFARLNESFLVLDEKKQSRHPVFATIKQEKSYHQTYPTIYHLRQALADSSEKADIRLVYLAMAHLLKYRGHFLIEGELNTENSSVTETFRQFLSTYNQQFSEADKLDEAVDCSFVFTEKMSKTKKAETLLKYFPHEKSNGYLSQFIKLMVGNQGNFKNVFGLEEEAKLQFSKETYEEDLEELLEKIGDDYIDLFVQAKNVYDAVLLSEILSDSTKNTRAKLSAGMIRRYDAHKEDLVLLKRFVKENLPKKYRAFFGDNSVNGYAGYIEGHATQEDFYKFVKKELTGIRGSEVFLTKIEQENFLRKQRTFDNGVIPHQIHLTELRAIIANQKKHYPFLKEEQEKLESLLTFKIPYYVGPLAKKQENSPFAWLIRKSEEKIKPWNLPEIVDMEGSAVRFIERMINTDMYIPHNKVLPKNSLLYQKFSIYNELTKVRYQDERGQMNYFSSIEKKEIFHELFEKNRKVTKKDLQEFLYLKYDIKHAELSGIEKAFNASYTTYHDFLTMSENKQWLEDPELASMFEEIIKTLTVFEDREMIKTRLSHHEATLGKHIIKKLTKKHYTGWGRLSKELIQGIRDKQSNKTILDYLIDDDFPHHRNRNFMQLINDDSLSFKKEIKKAQMITDTENLEEIVKELTGSPAIKKGILQSLKIVDEIVGIMGYEPANIVVEMARENQTTGRGLKSSRPRLKALEESLKDFGSQLLKEYPTDNSSLQKDRLYLYYLQNGRDMYTGAPLDIHRLSDYDIDHIIPRSFTTDNSIDNKVLVSSKENRLKKDDVPSEKVVKKMRSFWYDLYSSKLISKRKLDNLTKIKLTEEDKAGFIKRQLVETRQITKHVAGILHHRFNKAEDTNEPIRKVRIITLKSALVSQFRNRFGIYKVREINEYHHAHDAYLNGVVALALLKKYPQLAPEFVYGEYLKFNAHKANKATVKKEFYSNIMKFFESDTPVCDENGEIFWDKSKSIAQVKKVINHHHMNIVKKTEIQKGGFSKETVEPKKDSSKLLPRKNNWDPAKYGGLGSPNVAYTVAFTYEKGKARKRTNALEGITIMEREAFEQSPVLFLKNKGYEQAEIEMKLPKYALFELENGRKRMVASKEAQKANSFLLPEHLVTLLYHAKQYDEISHKESFDYVNEHHKEFSEVFARVLEFAGKYTLAEKNIEKLEKIYKENQTDDLAKLASSFVNLMQFNAMGAPADFKFFDVTIPRKRYTSLTEIWQSTIIHQSITGLYETRIRMGK

SEQ ID NO: 215 - protein, 1328 aa, Enterococcus faecium
MKKEYTIGLDIGTNSVGWSVLTDDYRLVSKKMKVAGNTEKSSTKKNFWGVRLFDEGQTAEARRSKRTARRRLARRRQRILELQKIFAPEILKIDEHFFARLNESFLVLDEKKQSRHPVFATIKQEKSYHQTYPTIYHLRQALADSSEKADIRLVYLAMAHLLKYRGHFLIEGELNTENSSVTETFRQFLSTYNQQFSEADKLDEAVDCSFVFTEKMSKTKKAETLLKYFPHEKSNGYLSQFIKLMVGNQGNFKNVFGLEEAKLQFSKETYEEDLEELLEKIGDDYIDLFVQAKNVYDAVLLSEILSDSTKNTRAKLSAGMIRRYDAHKEDLVLLKRFVKENLPKKYRAFFGDNSVNGYAGYIEGHATQEDFYKFVKKELTGIRGSEVFLTKIEQENFLRKQRTFDNGVIPHQIHLTELRAIIANQKKHYPFLKEEQEKLESLLTFKIPYYVGPLAKKQENSPFAWLIRKSEEKIKPWNLPEIVDMEGSAVRFIERMINTDMYIPHNKVLPKNSLLYQKFSIYNELTKVRYQDERGQMNYFSSIEKKEIFHELFEKNRKVTKKDLQEFLYLKYDIKHAELSGIEKAFNASYTTYHDFLTMSENKQWLEDPELASMFEEIIKTLTVFEDREMIKTRLSHHEATLGKHIIKKLTKKHYTGWGRLSKELIQGIRDKQSNKTILDYLIDDDFPHHRNRNFMQLINDDSLSFKKEIKKAQMITDTENLEEIVKELTGSPAIKKGILQSLKIVDEIVGIMGYEPANIVVEMARENQTTGRGLKSSRPRLKALEESLKDFGSQLLKEYPTDNSSLQKDRLYLYYLQNGRDMYTGAPLDIHRLSDYDIDHIIPRSFTTDNSIDNKVLVSSKENRLKKDDVPSEKVVKKMRSFWYDLYSSKLISKRKLDNLTKIKLTEEDKAGFIKRQLVETRQITKHVAGILHHRFNKAEDTNEPIRKVRIITLKSALVSQFRNRFGIYKVREINEYHHAHDAYLNGVVALALLKKYPQLAPEFVYGEYLKFNAHKANKATVKKEFYSNIMKFFESDTPVCDENGEIFWDKSKSIAQVKKVINHHHMNIVKKTEIQKGGFSEETVEPKKDSSKLLPRKNNWDPAKYGGLGSPNVAYTVAFTYEKGKARKRTNALEGITIMEREAFEQSPVLFLKNKGYEQAEIEMKLPKYALFELENGRKRMVASKEAQKANSFLLPEHLVTLLYHAKQYDEISHKESFDYVNEHHKEFSEVFARVLEFAGKYTLAEKNIEKLEKIYKENQTDDLAKLASSFVNLMQFNAMGAPADFKFFDVTIPRKRYTSLTEIWQSTIIHQSITGLYETRIRMGK

SEQ ID NO: 216 - protein, 1329 aa, Enterococcus faecium
MKKEYTIGLDIGTNSVGWSVLTDDYRLVSKKMKVAGNTEKSSTKKNFWGVRLFDEGQTAEARRSKRTARRRLARRRQRILELQKIFAPEILKIDEHFFARLNESFLVLDEKKQSRHPVFATIKQEKSYHQTYPTIYHLRQALADSSEKADIRLVYLAMAHLLKYRGHFLIEGELNTENSSVTETFRQFLSTYNQQFSEADKLDEAVDCSFVFTEKMSKTKKAETLLKYFPHEKSNGYLSQFIKLMVGNQGNFKNVFGLEEEAKLQFSKETYEEDLEELLEKIGDDYIDLFVQAKNVYDAVLLSEILSDSTKNTRAKLSAGMIRRYDAHKEDLVLLKRFVKENLPKKYRAFFGDNSVNGYAGYIEGHATQEDFYKFVKKELTGIRGSEVFLTKIEQENFLRKQRTFDNGVIPHQIHLTELRAIIANQKKHYPFLKEEQEKLESLLTFKIPYYVGPLAKKQENSPFAWLIRKSEEKIKPWNLPEIVDMEGSAVRFIERMINTDMYMPHNKVLPKNSLLYQKFSIYNELTKVRYQDERGQMNYFSSIEKKEIFHELFEKNRKVTKKDLQEFLYLKYDIKHAELSGIEKAFNASYTTYHDFLTMSENKQWLEDPELASMFEEIIKTLTVFEDREMIKTRLSHHEATLGKHIIKKLTKKHYTGWGRLSKELIQGIRDKQSNKTILDYLIDDDFPHHRNRNFMQLINDDSLSFKKEIKKAQMITDTENLEEIVKELTGSPAIKKGILQSLKIVDEIVGIMGYEPANIVVEMARENQTTGRGLKSSRPRLKALEESLKDFGSQLLKEYPTDNSSLQKDRLYLYYLQNGRDMYTGAPLDIHRLSDYDIDHIIPRSFTTDNSIDNKVLVSSKENRLKKDDVPSEKVVKKMRSFWYDLYSSKLISKRKLDNLTKIKLTEEDKAGFIKRQLVETRQITKHVAGILHHRFNKAEDTNEPIRKVRIITLKSALVSQFRNRFGIYKVREINEYHHAHDAYLNGVVALALLKKYPQLAPEFVYGEYLKFNAHKANKATVKKEFYSNIMKFFESDTPVCDENGEIFWDKSKSIAQVKKVINHHHMNIVKKTEIQKGGFSKETVEPKKDSSKLLPRKNNWDPAKYGGLGSPNVAYTVAFTYEKGKARKRTNALEGITIMEREAFEQSPVLFLKNKGYEQAEIEMKLPKYALFELENGRKRMVASKEAQKANSFLLPEHLVTLLYHAKQYDEISHKESFDYVNEHHKEFSEVFARVLEFAGKYTLAEKNIEKLEKIYKENQTDDLAKLASSFVNLMQFNAMGAPADFKFFDVTIPRKRYTSLTEIWQSTIIHQSITGLYETRIRMGK

SEQ ID NO: 217 - protein, 1329 aa, Enterococcus faecium
MKKEYTIGLDIGTNSVGWSVLTDDYRLVSKKMKVAGNTEKSSTKKNFWGVRLFDEGQTAEARRSKRTARRRLARRRQRILELQKIFAPEILKIDEHFFARLNESFLVLDEKKQSRHPVFATIKQEKSYHQTYPTIYHLRQALADSSEKADIRLVYLAMAHLLKYRGHFLIEGELNTENSSVTETFRQFLSTYNQQFSEADKLDEAVDCSFVFTEKMSKTKKAETLLKYFPHEKSNGYLSQFIKLMVGNQGNFKNVFGLEEEAKLQFSKETYEEDLEELLEKIGDDYIDLFVQAKNVYDAVLLSEILSDSTKNTRAKLSAGMIRRYDAHKEDLVLLKRFVKENLPKKYRAFFGDNSVNGYAGYIEGHATQEDFYKFVKKELTGIRGSEVFLTKIEQENFLRKQRTFDNGVIPHQIHLTELRAIIANQKKHYPFLKEEQEKLESLLTFKIPYYVGPLAKKQENSPFAWLIRKSEEKIKPWNLPEIVDMEGSAVRFIERMINTDMYIPHNKVLPKNSLLYQKFSIYNELTKVRYQDERGQMNYFSSIEKKEIFHELFEKNRKVTKKDLQEFLYLKYDIKHAELSGIEKAFNASYTTYHDFLTMSENKQWLEDPELASMFEEIIKTLTVFEDREMIKTRLSHHEATLGKHIIKKLTKKHYTGWGRLSKELIQGIRDKQSNKTILDYLIDDDFPHHRNRNCMQLINDDSLSFKKEIKKAQMITDTENLEEIVKELTGSPAIKKGILQSLKIVDEIVGIMGYEPANIVVEMARENQTTGRGLKSSRPRLKALEESLKDFGSQLLKEYPTDNSSLQKDRLYLYYLQNGRDMYTGAPLDIHRLSDYDIDHIIPRSFTTDNSIDNKVLVSSKENRLKKDDVPSEKVVKKMRSFWYDLYSSKLISKRKLDNLTKIKLTEEDKAGFIKRQLVETRQITKHVAGILHHRFNKAEDTNEPIRKVRIITLKSALVSQFRNRFGIYKVREINEYHHAHDAYLNGVVALALLKKYPQLAPEFVYGEYLKFNAHKANKATVKKEFYSNIMKFFESDTPVCDENGEIFWDKSKSIAQVKKVINHHHMNIVKKTEIQKGGFSKETVEPKKDSSKLLPRKNNWDPTKYGGLGSPNVAYTVAFTYEKGKARKRTNALEGITIMEREAFEQSPVLFLKNKGYEQAEIEMKLPKYALFELENGRKRMVASKEAQKANSFLLPEHLVTLLYHAKQYDEISHKESFDYVNEHHKEFSEVFARVLEFAGKYTLAEKNIEKLEKIYKENQTDDLAKLASSFVNLMQFNAMGAPADFKFFDVTIPRKRYTSLTEIWQSTIIHQSITGLYETRIRMGK

SEQ ID NO: 218 - protein, 1329 aa, Enterococcus faecium
MTKDYTIGLDIGTNSVGWAVLTDDYQLMKRKMSVHGNTEKKKIKKNFWGARLFDEGQTAEFRRTKRTNRRRLARRKYRLSKLQDLFAEELCKQDDCFFVRLEESFLVPEEKQYKPASIFPTLEEEKEYYQKYPTIYHLRQKLVDSTEKEDLRLVYLALAHLLKYRGHFLFEGDLDTENTSIEESFRVFLEQYSKQSDQPLIVHQPVLTILTDKLSKTKKVEEILKYYPTEKINSFFAQCLKLIVGNQANFKRIFDLEAEVKLQFSKETYEEDLESLLEKIGDEYLDIFLQAKKVHDAILLSEIISSTVKHTKAKLSSGMVERYERHKADLAKFKQFVKENVPQKATVFFKDTTKNGYAGYIKGKTTQEEFYKFVKKELSGVVGSEPFLEKIDQETFLLKQRTYTNGVIPHQVHLIELKAIIDQQKQHYPFLEEAGPKIIALFKFRIPYYVGPLAKEQEASSFAWIERKTAEKINPWNFSEVVDIEKSAMRFIQRMTKQDTYLPTEKVLPKNSLLYQKYMIFNELTKVSYKDERGVKQYFSGDEKQQIFKQLFQKERGKITVKKLQNFLYTHYHIENAQIFGIEKAFNASYSTYHDFMKLAKTNEWLEQPEMEPIFEDIVKILTIFEDRQMIKHQLSKYQEVFGEKLLKEFARKHYTGWGRFSAKLIHGIRDRKTNKTILDYLIDDDVPANRNRNLMQLINDEHLSFKEEIAKATVFSKHKSLVDVIQDLPGSPAIKKGIWQSLKIVEELIAIIGYKPKNIVIEMARENQKTHRTSPRLKALENGLKQIGSTLLKEQPTDNKALQKERLYLYYLQNGRDMYTGEPLEIENLHQYEVDHIIPRSFIVDNSIDDKVLVASKQNQKKRDDVPKKQIVNEQRIFWNQLKEAKLISTKKYAYLTKIELTPEDKARFIQRQLVETRQITKHVANILHQSFNQEEEGTDCDGVQIITLKATLTSQFRQTFGLYKVREINPHHHAHDAYLNGFIANVLLKRYPKLAPEFVYGKYVKYSLARENKATAKKEFYSNILKFLESDEPFCDENGEIYWEKSHHLPRIKKVLSSHQVNVVKKVEQQKGGFYKETVNSKEKPDKLIERKNNWDVTKYGGFGSPVIAYAIAFVYAKGKTQKKTRAIEGITIMEQAAFEKDPTTFLKEKGFPQVTEFIKLPKYTLFEFDNGRRRFLASKESQKGNPFILSDQLVTLLYHAQHYDKITYQESFDYVNTHLSDFSAILTEVLAFAEKYTLADKNIERIQELYEENKYGETSMIAQSFLQLLQFNAIGAPADFKFFGVTIPRKRYTSLTEIWDATIIYQSVTGLYETRIRMGDLWAGEQ

SEQ ID NO: 219 - protein, 1329 aa, Enterococcus faecium
MKKEYTIGLDIGTNSVGWSVLTDDYRLVSKKMKVAGNTEKSSTKKNFWGVRLFDEGQTAEARRSKRTARRRLARRRQRILELQKIFAPEILKIDEHFFARLNESFLVLDEKKQSRHPVFATIKQEKSYHQTYPTIYHLRQALADSSEKADIRLVYLAMAHLLKYRGHFLIEGELNTENSSVTETFRQFLSTYNQQFSEADKLDEAVDCSFVFTEKMSKTKKAETLLKYFPHEKSNGYLSQFIKLMVGNQGNFKNVFGLEEEAKLQFSKETYEEDLEELLEKIGDDYIDLFVQAKNVYDAVLLSEILSDSTKNTRAKLSAGMIRRYDAHKEDLVLLKRFVKENLPKKYRAFFGDNSVNGYAGYIEGHATQEDFYKFVKKELTGIRGSEVFLTKIEQENFLRKQRTFDNGVIPHQIHLTELRAIIANQKKHYPFLKEEQEKLESLLTFKIPYYVGPLAKKQENSPFAWLIRKSEEKIKPWNLPEIVDMEGSAVRFIERMINTDMYMPHNKVLPKNSLLYQKFSIYNELTKVRYQDERGQMNYFSSIEKKEIFHELFEKNRKVTKKDLQEFLYLKYDIKHAELSGIEKAFNASYTTYHDFLTMSENKQWLEDPELASMFEEIIKTLTVFEDREMIKTRLSHHEATLGKHIIKKLTKKHYTGWGRLSKELIQGIRDKQSNKTILDYLIDDDFPHHRNRNFMQLINDDSLSFKKEIKKAQMITDTENLEEIVKELTGSPAIKKGILQSLKIVDEIVGIMGYEPANIVVEMARENQTTGRGLKSSRPRLKALEESLKDFGSQLLKEYPTDNSSLQKDRLYLYYLQNGRDMYTGAPLDIHRLSDYDIDHIIPRSFTTDNSIDNKVLVSSKENRLKKDDVPSEKVVKKMRSFWYDLYSSKLISKRKLDNLTKIKLTEEDKAGFIKRQLVETRQITKHVAGILHHRFNKAEDTNEPIRKVRIITLKSALVSQFRNRFGIYKVREINEYHHAHDAYLNGVIALALLKKYPQLAPEFVYGEYLKFNAHKANKATVKKEFYSNIMKFFESDTPVCDENGEIFWDKSKSIAQVKKVINHHHMNIVKKTEIQKGGFSKETVEPKKDSSKLLPRKNNWDPAKYGGLGSPNVAYTVAFTYEKGKARKRTNALEGITIMEREAFEQSPVLFLKNKGYEQAEIEMKLPKYALFELENGRKRMVASKEAQKANSFLLPEHLVTLLYHAKQYDEISHKESFDYVNEHHKEFSEVFARVLEFAGKYTLAEKNIEKLEKIYKENQTDDLAKLASSFVNLMQFNAMGAPADFKFFDVTIPRKRYTSLTEIWQSTIIHQSITGLYETRIRMGK

SEQ ID NO: 220 - protein, 1329 aa, Enterococcus faecium
MTKDYTIGLDIGTNSVGWAVLTDDYQLMKRKMSVHGNTEKKKIKKNFWGARLFDEGQTAEFRRTKRTNRRRLARRKYRLSKLQDLFAEELCKQDDCFFVRLEESFLVPEEKQYKPASIFPTLEEEKEYYQKYPTIYHLRQKLVDSTEKGDLRLVYLALAHLLKYRGHFLFEGDLDTENTSIEESFRVFLEQYGKQSDQPLIVHQPVLTILTDKLSKTKKVEEILKYYPTEKINSFFAQCLKLIVGNQANFKRIFDLEAEVKLQFSKETYEEDLESLLEKIGDEYLDIFLQAKKVHDAILLSEIISSTVKHTQAKLSSGMVERYERHKADLAKFKQFVKENVPQKATVFFKDTTKNGYAGYIKGKTTQEEFYKFVKKELSGVVGSEPFLEKIDQETFLLKQRTYTNGVIPHQVHLIELKAIIDQQKQHYPFLEEAGPKIIALFKFRIPYYVGPLAKEQEASSFAWIERKTAEKINPWNFSEVVDIEKSAMRFIQRMTKQDTYLPTEKVLPKNSLFYQKYMIFNELTKVSYKDERGVKQYFSGDEKQQIFKQLFQKERGKITVKKLQNFLYTHYHIENAQIFGIEKAFNASYSTYHDFMKLAKTNEWLEQPEMEPIFEDIVKILTIFEDRQMIKHQLSKYQEVFGEKLLKEFARKHYTGWGRFSAKLIHGIRDRKTNKTILDYLIDDDVPANRNRNLMQLINDEHLSFKEEIAKATVFSKHKSLVDVIQDLPGSPAIKKGIWQSLKIVEELIAIIGYKPKNIVIEMARENQKTHRTKPRLKALENGLKQIGSTLLKEQPTDNKALQKERLYLYYLQNGRDMYTGEPLEIENLHQYEVDHIIPRSFIVDNSIDNKVLVASKQNQKKRDDVPKKQIVNEQRIFWNQLKEAKLISPKKYAYLTKIELTPEDKARFIQRQLVETRQITKHVANILHQSFNQEEEGTDCDGVQIITLKATLTSQFRQTFGLYKVREINPHHHAHDAYLNGFIANVLLKRYPKLAPEFVYGKYVKYSLARENKATAKKEFYSNILKFLESDEPFCDENGEIYWEKSHHLPRIKKVLSSHQVNVVKKVEQQKGGFYKETVNSKEKPDKLIERKNNWDVTKYGGFGSPVIAYAIAFVYAKGKTQKKTKAIEGITIMEQAAFEKDPTTFLKDKGFPQVTEFIKLPKYTLFEFDNGRRRFLASKESQKGNPFILSDQLVTLLYHAQHYDKITYQESFDYVNTHLSDFSAILTEVLAFAEKYTLADKNIERIQELYEENKYGEISMIAQSFLQLLQFNAIGAPADFKFFGVTIPRKRYTSLTEIWDATIIYQSVTGLYETRIRMGDLWAGEQ

SEQ ID NO: 221 - protein, 1329 aa, Enterococcus faecium
MTKDYTIGLDIGTNSVGWAVLTDDYQLMKRKMSVHGNTEKKKIKKNFWGARLFDEGQTAEFRRTKRTNRRRLARRKYRLSKLQDLFAEELCKQDDCFFVRLEESFLVPEEKQYKPASIFPTLEEEKEYYQKYPTIYHLRQKLVDSTEKEDLRLVYLALAHLLKYRGHFLFEGDLDTENTSIEESFRVFLEQYSKQSDQPLIVHQPVLTILTDKLSKTKKVEEILKYYPTEKINSFFAQCLKLIVGNQANFKRIFDLEAEVKLQFSKETYEEDLESLLEKIGDEYLDIFLQAKKVHDAILLSEIISSTVKHTKAKLSSGMVERYERHKADLAKFKQFVKENVPQKATVFFKDTTKNGYAGYIKGKTTQEEFYKFVKKELSGVVGSEPFLEKIDQETFLLKQRTYTNGVIPHQVHLIELKAIIDQQKQHYPFLEEAGPKIIALFKFRIPYYVGPLAKEQEASSFAWIERKTAEKINPWNFSEVVDIEKSAMRFIQRMTKQDTYLPTEKVLPKNSLLYQKYMIFNELTKVSYKDERGVKQYFSGDEKQQIFKQLFQKERGKITVKKLQNFLYTHYHIENAQIFGIEKAFNASYSTYHDFMKLAKTNEWLEQPEMEPIFEDIVKILTIFEDRQMIKHQLSKYQEVFGEKLLKEFARKHYTGWGRFSAKLIHGIRDRKTNKTILDYLIDDDVPANRNRNLMQLINDEHLSFKEEIAKATVFSKHKSLVDVIQDLPGSPAIKKGIWQSLKIVEELIAIIGYKPKNIVIEMARENQKTHRTSPRLKALENGLKQIGSTLLKEQPTDNKALQKERLYLYYLQNGRDMYTGEPLEIENLHQYEVDHIIPRSFIVDNSIDNKVLVASKQNQKKRDDVPKKQIVNEQRIFWNQLKEAKLISPKKYAYLTKIELTPEDKARFIQRQLVETRQITKHVANILHQSFNQEEEGTDCDGVQIITLKATLTSQFRQTFGLYKVREINPHHHAHDAYLNGFIANVLLKRYPKLAPEFVYGKYVKYSLARENKATAKKEFYSNILKFLESDEPFCDENGEIYWEKSHHLPRIKKVLSSHQVNVVKKVEQQKGGFYKETVNSKEKPDKLIERKNNWDVTKYGGFGSPVIAYAIAFVYAKGKTQKKTRAIEGITIMEQAAFEKDPTTFLKEKGFPQVTEFIKLPKYTLFEFDNGRRRFLASKESQKGNPFILSDQLVTLLYHAQHYDKITYQESFDYVNTHLSDFSAILTEVLAFAEKYTLADKNIERIQELYEENKYGETSMIAQSFLQLLQFNAIGAPADFKFFGVTIPRKRYTSLTEIWDATIIYQSVTGLYETRIRMGDLWAGEQ

SEQ ID NO: 222 - protein, 1329 aa, Enterococcus faecium
MTKDYTIGLDIGTNSVGWAVLTDDYQLMKRKMSVHGNTEKKKIKKNFWGARLFDEGQTAEFRRTKRTNRRRLARRKYRLSKLQDLFAEELCKQDDCFFVRLEESFLVPEEKQYKPASIFPTLEEEKEYYQKYPTIYHLRQKLVDSTEKEDLRLVYLALAHLLKYRGHFLFEGDLDTENTSIEESFRVFLEQYGKQSDQPLIVHQPVLTILTDKLSKTKKVEEILKYYPTEKINSFFAQCLKLIVGNQANFKRIFDLEAEVKLQFSKETYEEDLESLLEKIGDEYLDIFLQAKKVHDAILLSEIISSTVKHTQAKLSSGMVERYERHKADLAKFKQFVKENVPQKATVFFKDTTKNGYAGYIKGKTTQEEFYKFVKKELSGVVGSEPFLEKIDQETFLLKQRTYTNGVIPHQVHLIELKAIIDQQKQHYPFLEEAGPKIIALFKFRIPYYVGPLAKEQEASSFAWIERKTAEKINPWNFSEVVDIEKSAMRFIQRMTKQDTYLPTEKVLPKNSLLYQKYMIFNELTKVSYKDERGVKQYFSGDEKQQIFKQLFQKERGKITVKKLQNFLYTHYHIENAQIFGIEKAFNASYSTYHDFMKLAKTNEWLEQPEMEPIFEDIVKILTIFEDRQMIKHQLSKYQEVFGEKLLKEFARKHYTGWGRFSAKLIHGIRDRKTNKTILDYLIDDDVPANRNRNLMQLINDEHLSFKEEIAKATVFSKHKSLVDVIQDLPGSPAIKKGIWQSLKIVEELIAIIGYKPKNIVIEMARENQKTHRTKPRLKALENGLKQIGSTLLKEQPTDNKALQKERLYLYYLQNGRDMYTGEPLEIENLHQYEVDHIIPRSFIVDNSIDNKVLVASKQNQKKRDDVPNKQIVNEQRIFWNQLKEAKLISPKKYAYLTKIELTPEDKARFIQRQLVETRQITKHVANILHQSFNQEEEGTDCDGVQIITLKATLTSQFRQTFGLYKVREINPHHHAHDAYLNGFIANVLLKRYPKLAPEFVYGKYVKYSLARENKATAKKEFYSNILKFLESDEPFCDENGEIYWEKSHHLPRIKKVLSSHQVNVVKKVEQQKGGFYKETVNSKEKPDKLIERKNNWDVTKYGGFGSPVIAYAIAFVYAKGKTQKKTRAIEGITIMEQAAFEKDPTTFLKDKGFPHVTEFIKLPKYTLFEFDNGRRRFLASKESQKGNPFILSDQLVTLLYHAQHYDKITYQESFDYVNTHLSDFSAILTEVLAFAEKYTLADKNIERIQELYEENKYGEISMIAQSFLQLLQFNAIGAPADFKFFGVTIPRKRYTSLTEIWDATIIYQSVTGLYETRIRMGDLWAGEQ

SEQ ID NO: 223 - protein, 1324 aa, Enterococcus italicus
MKNDYTIGLDIGTNSVGYSVVTDDYKVISKKMNVFGNTEKKSIKKNFWGVRLFESGQTAQEARMKRTSRRRIARRKNRICYLQEIFQPEMNHLDNNFFYRLNESFLVADDAKYDKHPIFGTLDEEIHFHEQFPTIYHLRKYLADGDEKADLRLVYLAIAHIIKFRGNFLIEGELNTENNSVIELSKVFVQLYNQTLSELEFIDESIDFSEVLTQQLSKSERADNVLKLFPDEKGTGIFAQFIKLIVGNQGNFKKVFQLEEDQKLQLSTDDYEENIENLLAIIGDEYGDIFVAAQNLYQAILLAGILTSTEKTRAKLSASMIQRYEEHAKDLKLLKRFVKEHIPDKYAEIFNDATKNGYAGYIDGKTKEEEFYKYLKTTLVQKSGYQYFIEKIEQENFLRKQRIYDNGVIPHQVHAEELRAILRKQEKYYSFLKENHEKIEQIFKVRIPYYVGPLAKHNEQSRFAWNIRKSDEPIRPWNMNDVVDENASAVAFIERMTIKDIYLNENVLPRHSLIYEKFTVFNELTKVLYADDRGVFQRFSAEEKEDIFEKLFKSERKVTKKKLENYLRIELSISSPSVKGIEEQFNANFGTYLDLKKFDELHPYLDDEKYQDTLEEVIKVLTVFEDRSMIQNQLEQLPLNLSTKTIKALSRRKYTGWGRLSARLIDGIHDKNSGKTILDYLIDESDSYIVNRNFMQLINDDHLSFKKIIEDSQPYKEQQSAEEIVSELSGSPAIKKGILQSLKIVDELVAIMGYKPKNIVVEMARENQTTGRGKQNSKPRLKGIENGLKEFSDSVLKGSSIDNKQLQNDRLYLYYLQNGKDMYTGHELDIDHLSTYDIDHIIPQSFLTDNSIDNRVLTTSKSNRGKSDNVPSEEVVRKMDRFWRKLLNAKLISERKYTNLTKKELTESDKAGFLKRQLVETRQITKHVATILDSKFNEDSNNRDVQIITLKSALVSEFRKTFNLYKVREINDLHHAHDAYLNAVVALSLLRVYPQLKPEFVYGEYGKNSIHDQNKATIKKQFYSNITRYFASKDIINDDGEILWNKQETIAQVIKTLGMHQVNVVKKVEIQKGGFSKESIQPKGESQKLIRRKQQWNTKKYGGFDSPVVAYAILLSFDKGKRKARSFKIVGITIQDRESFEGNPILYLSKKDYHNPKVEAILPKYSLFEFENGRRRMVASSETQKGNQLIIPGHLMELLYHSKKIINGKNSDSVSYIQNNKEKFREIFEYIVDFSSKYISADANLNKIEKIFENNFHKASEQEIAKSFINLLTFTAMGAPADFEFFGEKIPRKRYVSISEIIDAVFIHQSITGLYETRVRLTEV

SEQ ID NO: 224 - protein, 1323 aa, Enterococcus mundtii
MEKEYTIGLDIGTNSVGWAVLTDDYRLVARKMSIQGDSNRKKIKKNFWGARLFEEGKTAQFRRIKRTNRRRIARRRQRVLALQDIFAEEIHKKDPNFFARLEEGDRVEADKRFAKFPVFATLSEEKNYHRQYPTIYHLRHDLANSKEQADIRLVYLAIAHCLKYRGHFLFEGELDTENTSVTENYQQFLQAYQQFFPEPIGDLDDAVPILTERLSKAKRVEKVLAYYPSEKSTGNFAQFLKLMVGNQANFKKTFDLEEEMKLNFTRDCYEEDLNELLEKTSDDYAELFLKAKGVYDAILLSQILSKSDDETKAKLSANMKLRFEEHQRDLKQLKELVRRDLPKKYDDFFKNRSKNGYAGYVKGKATQEDFYKFLRTELAGLEESQSIMEKIDLEIYLLKQRTFANGVIPHQIHLVEMREIMDRQKRFYPFLKGAQGKIEKLLTFRIPYYVGPLAQEGQSPFAWIKRKSPSQITPWNFAEVVDKENSAIEFIERMTNQDTYLPKEKVLPKQSLIYQRFMIFNELTKVSYTDERGKSHYFSSEQKRKIFNELFKQHPRVTEKQLRKFLELNEQIDSTEIKGIETSFNASYSTYHDLLKLSTLLDDPDMTTMFEEIIKILTIFEDREMIREQLKPYETVLGLPAIKKLAKKHYTGWGRLSEKMIQGMREKQSRKTILDYLIDDDFPCNRNRNFMQLINDDHLSFKETIANELIMSDSNVLLDQVKAIPGSPAVKKGIWQSIKIVEEIIGIIGKAPKNIVIEMARENQRTSRSRPRLKALEEALKNIDSPLLKDYPTDNQALQKDRLYLYYLQNGKDMYTGEPLEIHRLSEYDIDHIIPRSFIVDNSLDNKVLVSSKVNRGKLDNAPDPLVVKRMRSHWEKLHQAKLISDKKLANLTKQNLTEADKARFIQRQLVETRQITKHVANLLHQHFNLPEEVSATEKTSIITLKSTLTSQFRQMFDIYKVREINHHHHAHDAYLNGVVAMTLLKKYPKLAPEFVYGSYIKGDINQINKATAKKEFYSNIMKFFESEEIICDEQGEVIWNKKRDLSTIKKTIGAHQVNIVKKVEKQKGGFYKETINSKANPEKLIPRKASLDPLKYGGYGSPLVAYTVIFIFEKGKQKKVTKGIEGITVMEQLRFEQDPREFLKTKGYEGVKQWLILPKYILFEAQGGYRRMIASQETQKANSLILPENLVTLLYHARHYDEINHKVSFDYVNAHKEGFNDIFDFISDFGVRYILAPQHLEKIKVAYEKNKEVDLKEMIDAILSLLKFTLFGASVEFKFFDIKILKRYKSLTDIWEATIIYQSVTGLYERRVEVRKLWDGER

SEQ ID NO: 225 - protein, 1330 aa, Enterococcus phoeniculicola
MKKEYTIGLDIGTNSVGWAVLTENYDLVKKKMKVYGNTETKYLKKNLWGVRLFDEGETAADRRLKRTTRRRYSRRRNRICRLQDLFTEEMNQVDANFFHRLQESFLVPDEKEFERHAIFGKMEEEVSYYREFPTIYHLRKHLADTSEQADLRLVYLALAHIVKYRGHFLIEGELNTENSSVSETFRTFIQVYNQIFRENEPLAVPDNIEELFSEKVSRARKVEAILSVYSEEKSTGTLAQFLKLMVGNQGRFKKTFDLEEDGIIQIPKEEYEEELETLLAIIGDEYAEIFSATKSVYDAVALSGILSVTDGDTKAKLSASMVERYEAHQKDLVQFKQFIRKELPEMYAPIFRDNSVSGYAGYVENSVTQAEFYKYIKKAIEKVPGAEYFLEKIEQETFLDKQRTFNNGVIPHQIHLEELEAIIQKQATYYPFLADNKEEMKQLVTFRIPYYVGPLADGNSPFAWLERISSEPIRPGNLAEVVDIKKSATKFIERMTNFDTYLPTEKVLPKHSMIYEKYMVYNELTKVSYVDERGMNQRFSGEEKKQIVEELFKQSRKVTKKLLEKFLSNEFGLVDVAIKGIETSFNAGYGTYHDFLKIGITREQLDKEENSETLEEIVKILTVFEDRKMIREQLKKYTYLFDEEVLKKLERRHYTGWGRLSAKLLIGIKEKRTHKTILDYLIDDGGKQPINRNLMQLINDSDLSFKSEIAEAQSDMNTEDLHEVVQNLAGSPAIKKGILQSLKIVDELVDIMGSLPKNIVVEMARENQTTSRGRTNSNPRMKALEEAMRNLRSNLLKEYPTDNQALQNDRLYLYYLQNGKDMYTGLDLSLHNLSSYDIDHIVPQSFTTDNSLDNRVLVSSKENRGKKDDVPSKEVVQKNITLWETLKNSNLISQKKYDNLTKGLRGGLTEDDRAHFIKRQLVETRQITKHVARILDQRFNSQKDEEGKTIRAVRVVTLKSSLTSQFRKQFAIHKVREINDYHHGHDAYLNGVVANSLLRVYPQLQPEFVYGDYPKFNAYKANKATAKKQLYTNIMKFFAEDAVIIDENGEILWDKKNIATVKKVMSYPQMNIVKKPEIQTGSFSKETIKPKGDSDKLISRKTNWSPKLYGGFDSPQVAYSVIITYEKGKKKVRAKAIVGITIMEQSLFKKDPVSLLEEKGYANPEVLIHLPKYTLYELENGRRRLLASANEAQKGNQLVLPASLVTLLYHAKQVDEDSGKSEEYVREHRAEFAEILNYVQAFSETKILANKNLQTILKLYEENKEADIKEIAESFVNLMKFSAYGAPMDFKFFGKTIPRSRYTSVGELLSATIINQSITGLYETRRKLVD

SEQ ID NO: 226 - protein, 1327 aa, Enterococcus sp. AM1
MGKEYTIGLDIGTNSVGWAVLQEDLDLVRRKMKVYGNTEKNYLKKNFWGVDLFDEGMTAKDTRLKRTTRRRYFRRRQRISYLQTFFQEEMNRIDPNFFNRLDESFLIEEDKLSERHPIFGTIEEEVAYHKNYATIYHLRKELADAEEKADLRLVYLALAHIIKYRGHFLIEGRLSTENTSTEETFKTFLQKYNQTFNPVDETISIGSIFADKVSRAKKAEGVLALFPDEKRNGTFDQFLKMIVGNQGNFKKTFELEEDAKLQFSKEEYDESLEALLGEIGDEYADVFEAAKNVYNAVELSGILTVTDNSTKAKLSASMIKRYEDHKTDLKLFKEFIRKNLPEKYHEIFNDKNTDGYAGYIDNSTSQEKFYKYITNLIEKIDGAEYFLKKIENEDFLRKQRTFDNGIIPHQIHLEELKAILHHQAMYYPFLQEKFSNFVDLLTFRIPYYVGPLANGNSRFSWLSRKSDEPIRPWNLAEVVDLSKSAELFIERMTNFDLYLPSEKVLPKHSMLYEKYTVYNELTKVTYKDEQGKVQNFSSEEKERIFIDLFKQHRKVTKKDLSNFLRNEYNLDDVIIDGIENKFNASFNTYHDFLKLKIDPKVLDDPANEPMFEEIVKILTIFEDRKMLREQLSKFSDRLSEKTIKDLERRHYTGWGRLSAKLINGIHDKQSNKTILDYLIDDAPKKNINRNFMQLINDNRLTFKEEIEKEQLKANSEESLIEIVQNLAGSPAIKKGIFQSLKIVDELVEIMGYAPTNIVVEMARENQTTANGRRNSRPRLKNLEKAIDDLDSEILKKHPVDNKALQKDRLYLYYLQNGKDMYTNEELDIHKLSTYDIDHIIPQSFIVDNSLDNRVLVSSSKNRGKLDDVPSKEVVKKMRAFWESLYRSGLISKKKFDNLVKAESGGLSEDDKAGFIHRQLVETRQITKNVARILHQRFNSEKDEEGNLIRKVRIITLKSALTSQFRKNYGIYKIREINDYHHAHDAYLNGVVATALLKIYPQLEPEFVYGEFHRFNAFKENKATAKKQFYSNLMEFSKSDKVIIDENGEILWNQKKIVTVKKVMNYRQMNIVKKVEIQKGGFSKESILPKGDSDKLISRKKEWDTTKYGGFDSPNVAYSVVIRYEKGKTRKLVKTIVGITIMERAAFEKNEREFLKNKGYQNPQICMKLPKYSLYEFDDGRRRLLASAKEAQKGNQMVLPAHLVTFLYHAKHCNEKPDSLKYVTEHQSGFSEIMAHVKDFAEKYTLVDKNLEKILSLYAKNMDSEVKEIAQSFVDLMQLNAFGAPADFKFFGETIPRKRYTSVNELLEATIINQSITGLYETRRRLGD

SEQ ID NO: 227 - protein, 1332 aa, Enterococcus villorum
MNKAYTLGLDIGTNSVGWAVVTDDYRLMAKKMPVHSKMEKKKIKKNFWGARLFDEGQTAEERRNKRATRRRLRRRKYRILELQKIFSEEILKKDSHFFARLDESFLIPEDKQYARFPIFPTLLEEKAYYQNYPTIYHLRQKLADSTEKADIRLVYLALAHMIKYRGHFLFEGELDTENTSVEETFKEFIDIYNEQFEEGIIFYKDIPLILTDKLSKSKKVEKILQYYPKEKTTGCLAQFLKLIVGNQGNFKQAFHLDEEVKIQISKETYEEDLEKLLRKSNEEMIDVFLQVKKVYDAILLSDILSTKMKDTKAKLSAGMIERYQNHKKDLEELKQFVRAHLHEKVTVFFKDSSKDGYAGYIDGKTTQADFYKFLKKELTGVPGSEPMLAKIDQENFLLKQRTPTNGVIPHQVHLTEFKAIIDQQKQYYPFLEKSKEKMIQLLTFRIPYYVGPLAQDKETSSFAWLERKTTEKIKPWNAKDVIDYGASATKFIQRMINYDTYLPTEKVLPKYSMLYQKYTIFNELTKVAYKDDRGIKHQFSSEEKLRIFQELFKKQRRVTKKKLQHFLSANYNIEDAEILGVDKVFNSSYATYHDFLELAKPYELLEQPEMEEMFEDIVKIITIFEDREMVRTQLKKYQRILGEEIFKKLVKKKYTGWGRLSKRLINGIRDQKTNKTILDYLIDDDFPYNRNRNFMQLINDDHLSFKEEIAKELTLSDKQSLLEVVEAIPGSPAIKKGIWQTLKIVEELIAIIGYKPKNIVIEMARENQTTTGGKNRSKPRLKSLEEALKNFDSQLLKERPVDNQSLQKDRLYLYYLQNGKDMYTGESLDIDRLSEYDIDHIIPRSFIVDHSLDNKVLVSSKENRLKKDDVPDSKVVKRMKAYWEKLLRANLISERKFSYLTKLELTDDDKARFIQRQLVETRQITKHVAAILHQYFNQTQELEKEKDIRIITLKSSLVSQFRQVFGIHKVREINHHHHAHDAYLNAVVALALLKKYPRLAPEFVYGSFAKFHLVKENKATAKKEFYSNILKFFEKEEQFCDENGEIFWDKRKHIQQIKKVISSHQVNIVKKVEVQTGSFYKETVNTKEKPDKLIKRKNNWDVTKYGGFGSPVVAYAVVFTYEKGKNHKKAKAIEGITIMEQALFEKDPISFLIEKGYSNVNQFIKLPKYTLFELANGQRRMLASQELQKANSFILPEKLVTLLYHANHYDEIAYKDSYDYVNEHFSNFQDILDKVIIFAEKYTSAPQKLNQIIATYEKNQEADRKIMAHSFVNLMQFNALGAPADFKFFDTTITRKRYTSLTEIWQSTIIYQSVTGLYETRRRMADLWDGVQ

SEQ ID NO: 228 - protein, 1359 aa, Artificial Sequence
  Synthetic polypeptide
ADKKYSIGLDIGTNSVGWAVITDEYKVPSKKFKVLGNTDRHSIKKNLIGALLFDSGETAEATRLKRTARRRYTRRKNRICYLQEIFSNEMAKVDDSFFHRLEESFLVEEDKKHERHPIFGNIVDEVAYHEKYPTIYHLRKKLVDSTDKADLRLIYLALAHMIKFRGHFLIEGDLNPDNSDVDKLFIQLVQTYNQLFEENINASGVDAKAILSARLSKSRRLENLIAQLPGEKKNGLFGNLIALSLGLTPNFKSNFDLAEDAKLQLSKDTYDDDLDNLLAQIGDQYADLFLAAKNLSDAILLSDILRVNTEITKAPLSASMIKRYDEHHQDLTLLKALVRQQLPEKYKEIFFDQSKNGYAGYIDGGASQEEFYKFIKPILEKMDGTEELLVKLNREDLLRKQRTFDNGSIPHQIHLGELHAILRRQEDFYPFLKDNREKIEKILTFRIPYYVGPLARGNSRFAWMTRKSEETITPWNFEEVVDKGASAQSFIERMTNFDKNLPNEKVLPKHSLLYEYFTVYNELTKVKYVTEGMRKPAFLSGEQKKAIVDLLFKTNRKVTVKQLKEDYFKKIECFDSVEISGVEDRFNASLGTYHDLLKIIKDKDFLDNEENEDILEDIVLTLTLFEDREMIEERLKTYAHLFDDKVMKQLKRRRYTGWGRLSRKLINGIRDKQSGKTILDFLKDGFANRNFMQLIHDDSLTFKEDIQKAQVSGQGDSLHEHIANLAGSPAIKKGILQTVKVVDELVKVMGRHKPENIVIEMARENQTTQKGQKNSRERMKRIEEGIKELGSQILKEHPVENTQLQNEKLYLYYLQNGRDMYVDQELDINRLSDYDVDHIVPQSFLKDDSIDNKVLTRSDKNRGKSDNVPSEEVVKKMKNYWRQLLNAKLITQRKFDNLTKAERGGLSELDKAGFIKRQLVETRQITKHVAQILDSRMNTKYDENDKLIREVKVITLKSKLVSDFRKDFQFYKVREINNYHHAHDAYLNAVVGTALIKKYPKLESEFVYGDYKVYDVSEQEIGKATAKYFFYSNIMNFFKTEITLANGEIRKRPLIETNGETGEIVWDKGRDFATVRKVLSMPQVNIVKKTEVQTGGFSKESILPKRNSDKLIARKKDWDPKKYGGFDSPTVAYSVLVVAKVEKGKSKKLKSVKELLGITIMERSSFEKNPIDFLEAKGYKEVKKDLIIKLPKYSLFELENGRKRMLASGELQKGNELALPSKYVNFLYLASHYEKLKGSPEDNEQKQLFVEQHKHYLDEIIEQISEFSKRVILADANLDKVLSAYNKHRDKPIREQAENIIHLFTLTNLGAPAAFKYFDTTIDRKRYTSTKEVLDATLIHQSITGLYETRIDLSQLGGD

SEQ ID NO: 229 - protein, 1300 aa, Kandleria vitulina
NNKIYNIGLDIGDASVGWAVVDEHYNLLKRHGKHMWGSRLFTQANTAVERRSSRSTRRRYNKRRERIRLLRGIMEDMVLDVDPTFFIRLANVSFLDQEDKKDYLKSNYNLFIDKDFNDKTYYDKYPTIYHLRKHLCESKEKEDPRLIYLALHHIVKYRGNFLYEGQKFSMDVSNIEDKMIDVLRQFNEINLFEYVEDKKIDEVLNVLKEPLSKKHKADKAFALFDTTKDNKAAYKELCAALAGNKFNVTKMLKEAELHDEDEKDISFKFSDATFDDAFVEKQPLLGDCVEFIDLLHDIYSWVELQNILGSAHTSEPSISAAMIQRYEDHKNDLKLLKDVIRKYLPKKYFEVFRDEKSKKNNYCNYINHKTPVDEFYKYIKKLIEKIDDPDVKTILNKIELESFMLKQNSRTNGAVPYQMQLDELNKILENQSVYYSDLKDNEDKIRSILTFRIPYYFGPLITKDRQFDWIIKKEGKENERILPWNANEIVDVDKTADEFIKRMRNFCTYFPDEPVLAKNSLTVSKYEVLNEINKLRINDHLIKRDIKDKMLHTLFMDHKSISANAMKKWLVKNQYFSNTDDIKIEGFQKENACSTSLTPWIDFTKIFGEINNSNYELIEKIIYDVTVFEDKKILRRRLKKEYDLDEEKIKKILKLKYSGWSRLSKKLLSGIKTKRTPETVLEVMETNMNLMQVINDEKLGFKKTIDDANSTSVSGKFSYAEVQELAGSPAIKRGIWQALLIVDEIKKIMKHEPAHVYIEFARNEDKERKDSFVNQMLKLYKDFEDEANKHLKGEDAKSKIRSERLKLYYTQMGKCMYTGKSLDIDRLDTYQVDHIVPQSLLKDDSIDNKVLVLSSENQRKLDDLVIPEMIRNKMFGFWNKLYENKIISPKKFYSLIKSEYSDKDKERFINRQIVETRQITKHVAQIISNHYETTKVVTVRADLSHAFRERYHIYKNRDINDFHHAHDAYIATILGTYIGHRFESLDAKYIYGEYQKIFRNKNKDKKDGFILNSMRNLYADKDTGEVVWDPEWISRIKKCFYYKDCFVTKKLEENNGSFFNTVRPNDEHSEKGAKVPVNKLRSNVHKYGGFEGLKYSIVAIKGKKKKGKKIIDVNKLVGIPLMYKNVDDETKINYIKESEGLEEVKIIKEILKNQLIEINGGLFYVTSEIVNARQLILDFNCTRIIDGIYKAMKYKNYSELSQEEIMNVYDIFVEKLKLYYPTYKNIATNFENFENISDEEKCEVIQMLVVMHAGPQNGNITFDDFKLSNRLGRLNCKTISLTTVFIADSPTGMYSKKYKL

SEQ ID NO: 230 - protein, 1301 aa, Kandleria vitulina
NNKIYNIGLDIGDASVGWAVVDEHYNLLKRHGKHMWGSRLFTQANTAVERRSSRSTRRRYNKRRERIRLLREIMEDMVLDVDPTFFIRLANVSFLDQEDKKDYLKSNYNLFIDKDFNDKTYYDKYPTIYHLRKHLCESKEKEDPRLIYLALHHIVKYRGNFLYEGQKFSMDVSNIEDKMIDVLRQFNEINLFEYVEDKKIDEVLNVLKEPLSKKHKAEKAFALFDTTKDNKAAYKELCAALAGNKFNVTKMLKEAELHDEDEKDISFKFSDATFDDAFVEKQPLLGDCVEFIDLLHDIYSWVELQNILGSAHTSEPSISAAMIQRYEDHKNDLKLLKDVIRKYLPKKYFEVFRDEKSKKNNYCNYINHKTPVDEFYKYIKKLIEKIDDPDVKTILNKIELESFMLKQNSRTNGAVPYQMQLDELNKILENQSVYYSDLKDNEDKIRSILTFRIPYYFGPLITKDRQFDWIIKKEGKENERILPWNANEIVDVDKTADEFIKRMRNFCTYFPDEPVMAKNSLTVSKYEVLNEINKLRINDHLIKRDMKDKMLHTLFMDHKSISANAMKKWLVKNQYFSNTDDIKIEGFQKENACSTSLTPWIDFTKIFGKINESNYDFIEKIIYDVTVFEDKKILRRRLKKEYDLDEEKIKKILKLKYSGWSRLSKKLLSGIKTKRTPETVLEVMETNMNLMQVINDEKLGFKKTIDDANSTSVSGKFSYAEVQELAGSPAIKRGIWQALLIVDEIKKIMKHEPAHVYIEFARNEDKERKDSFVNQMLKLYKDFEDEANKHLKGEDAKSKIRSERLKLYYTQMGKCMYTGKSLDIDRLDTYQVDHIVPQSLLKDDSIDNKVLVLSSENQRKLDDLVIPSSIRNKMYGFWEKLFNNKIISPKKFYSLIKTEFNEKDQERFINRQIVETRQITKHVAQIIDNHYENTKVVTVRADLSHQFRERYHIYKNRDINDFHHAHDAYIATILGTYIGHRFESLDAKYIYGEYKRIFRQKNKGKNDGFILNSMRNIYADKDTGEIVWDPNYIDRIKKCFYYKDCFVTKKLEENNGTFFNTVLPNDTNSDKDATVPVNKYRSNVNKYGGFSGVNSFIVAIKGKKKKGKKVIEVNKLTGIPLMYKNADEEIKINYLKQAEDLEEVQIGKEILKNQLIEKDGGLYYIVAEIINAKQLILNESQTKLVCEIYKAMKYKNYDNLDSEKIIDLYRLLINKMELYYPEYRKQLVKKFEDLKVISIEEKCNIIQILATLHCNSSIGKIMYSDFKISTTIGRLNGRTISLDISFIAESPTGMYSKKYKL

SEQ ID NO: 231 - protein, 1304 aa, Lactobacillus animalis
LKKDYSIGLDIGTNSVGHAVVTDDYKVPTKKMKVFGDTSKKTIKKNMLGVLLFNEGQTAADTRLKRGARRRYTRRKNRLRYLQEIFAPALAKVDPNFFYRLEESSLVAEDKKYDVYPIFGKREEELLYHDTHKTIYHLRSELANNDRPADLRLVYLALAHIIKYRGNFLLEGEIDLRTTDINKVFAEFSETLNENSDENLGKLDVADIFKDNTFSKTKKSEELLKLSGKKNQLAHQLFKMMVGNMGSFKKVLGTDEEHKLSFGKDTYEDDLNDLLAEAGDQYLDIFVAAKKVYDAAILASILDVKDTQTKTVFSQAMIERYEEHQKDLIELKRVFKKYLPEKCHDFFSEPKISGYAGYIDGKVSEEDFYKYTKKTLKGIPETEEILQKIDANNYLRKQRTFDNGAIPHQVHLKELVAIVENQGKYYPFLRENKDKFEKILNFRIPYYVGPLARGNSKFAWLTRAGEGKITPYNFDEMIDKETSAEDFIKRMTINDLYLPTEPVLPKHSLLYERYTIFNELAGVRYVTENGEAKYFDAQTKRSIFELFKLDRKVSEKMVIKHLKVVMPAIRIQALKGLDNGKFNASYGTYKDLVDMGVAPELLNDEVNSEKWEDIIKTLTIFEGRKLIKRRLENYRDFLGEDILRKLSRKKYTGWGRLSAKLLDGIYDKKTHKTILDCLMEDYSQNFMQLINDDTYSFKETIKNAQVIEKEETLAKTVQELPGSPAIKKGILQSLEIVDEIIKVMGYKPKSIVVEMARETQTHGTRKREDRVQQIVKNLKELPKPSNAELSDERKYLYCLQNGRDMYTGAPLDYDHLQFYDVDHIIPQSFLKDDSIENKVLTIKKENVRKTNGLPSEAVIQKMGSFWKKLLDAGAMTNKKYDNLRRNLHGGLNEKLKERFIERQLVETRQITKYVAQLLDQRLNYDGNGVELDEKIAIVTLKAQLASQFRSEFKLRKVRALNNLHHAHDAYLNAVVANLIMAKYPELEPEFVYGKYRKTKFKGLGKATAKNTLYANVLYFLKENEVYPFWDKARDLPTIKRYLYRAQVNKVRKAERQTGGFSDEMLVPKSDSGKLLPRKEGLDPVKYGGYAKAVESYAVLITADEVKKGKTKKVKTLVNIPIIDSKKYEADPTAYLASRGYTNVTNSFILPKYSLLEDPEGRRRYLASKEFQKANELILPQHLVELLYWVNAKDGEQKLEDHKAEFKELFDKIMEFADKYVVAPKNSEKIRRLYEENQDATPMELGKNFVELLRYTADGAASDFKFFGENIPRKRYNSAGSLLNGTLIYQSKTGLYETRIDLGKL

SEQ ID NO: 232 - protein, 1292 aa, Lactobacillus curvatus
MSRPYNIGLDIGTSSIGWSVVDDQSKLVSVRGKYGYGVRLYDEGQTAAERRSFRTTRRRLKRRKWRLGLLREIFEPYITPVDDTFFLRKKQSNLSPKDQRKQTSLFNDRTDRAFYDDYPTIYHLRYKLMTEKRQFDIREIYLAMHHIVKYRGHFLNEAPVSSFKSSEINLVAHFDRLNTIFADLFSESGFTDKLAEVKALLLDNHQSASNRQRQALLLIYTPSKQNKAIATELLKAILGLKAKFNVLTGIEAEDVKTWTLTFNAENFDEEMVKLESSLDDNAHQIIESLQELYSGVLLAGIVPENQSLSQAMITKYDDHQKHLKMLKAVREALAPEDRQRLKQAYDQYVDGKSKEDFYGDITKALKNNPDHPIVSEIKKLIELDQFMPKQRTKDNGAIPHQLHQQELDRIIENQQQYYPWLAELNPNKLDELVAFRVPYYVGPLQQQSSDAKFAWMIRKAEGQITPWNFDDKVDRQASANEFIKRMTTTDTYLLAEDVLPKQSLIYQRFEVLNELNGLKIDDQPITTELKQAIFTDLFMQKTSVTVKNIQDYLVSEKRYASRPAITGLSDENKFNSRLSTYHDLKTIVGDAVDDVDKQADLEKCIEWSTIFEDGKIYSAKLNEIDWLTDQQRVQLAAKRYRGWGRLSAKLLTQIVNANGQRIMDLLWTTDNFMRIVHSEDFDKLITEANQMMLAENDVQDVINDLYTSPQNKKALRQILLVVNDIQKAMKGQAPERILIEFAREDEVNPRLSVQRKRQVEQVYQNISELEIRNELKDLSNSALSNTRLFLYFMQGGRDMYTGDSLNIDRLSTYDIDHILPQSFIKDNSLDNRVLVSQRMNRSKADQVPSVELGQKMQIQWEQMLRAGLITKKKYDNLTLNPDMKGFINRQLVETRQVIKLATNLLMEQYGEDNIELITVKSGLTHQMRTEFDFPKNRNLNNHHHAFDAYLTAFVGLYLLKRYPKLKPYFVYGEYQKASQQDKRNFNFLNGLKKDELVDENTEAVIWNKESGLAYLNKIYQFKKILVTREVHENSGALFNQTLYAAKDDKASGQLIPAKQDRPTALYGGYSGKTVAYMCIVRIKNKKGDLYKVCGVETSWLAQLKQKKAFLKQKISPQFTKVKKQKGTIVKVVEDFEVIAPHILINQRFFDNGQELTLGSHNEQELILDKTAVKLLNGALPLTQSEELAEQVYDEILDQVMHYFPLYDTNQFRAKLSAGKAADGNKMVQVGQQVILDRVLIGLHANAAVSDLGVLKISTPLGKMQQPSGISDTQIIYQSPTGLFERRVALRDL

SEQ ID NO: 233 - protein, 1291 aa, Lactobacillus farciminis
KEQPYNIGLDIGTGSVGWAVTNDNYDLLNIKKKNLWGVRLFEGAQTAKETRLNRSTRRRYRRRKNRINWLNEIFSEELANTDPSFLIRLQNSWVSKKDPDRKRDKYNLFIDNPYTDKEYYREFPTIFHLRKELIINKNKADIRLVYLALHNILKYRGNFTYEHQKFNISTLNSNLSKELIELNQQLIKYDISFPDNCDWNHISDILIGRGNATQKSSNILNNFTKETKKLLKEVINLILGNVAHLNTIFKTSLTKDEEKLSFSGKDIESKLDDLDSILDDDQFTVLDTANRIYSTITLNEILNGESYFSMAKVNQYENHAIDLCKLRDMWHTTKNEKAVGLSRQAYDDYINKKKELYTSLKKFLKVALPTNLAKEAEEKISKGTYLVKPRNSENGVVPYQLNKIEMEKIIDNQSQYYPFLKENKEKLLSILSFRIPYYVGPLQSSEKNPFAWMERKSNGHARPWNFDEIVDREKSSNKFIRRMTVTDSYLVGEPVLPKNSLIYQRYEVLNELNNIRITENLKTNPTGSRLTVETKQHIYNELFKNYKKITVKKLTKWLIAQGYYKNPILIGLSQKDEFNSTLTTYLDMKKIFGSSFMENNKNYNQIEELIEWLTIFEDKQILNEKLHSSNYSYTSDQIKKISNMRYKGWGRLSKKILTCITTETNTPKSLQLSNDLMWTTNNNFISIISNDKYDFKNYIENHNLNKNEDQNISNLVNDIHVSPALKRGITQSIKIVQEIVKFMGHAPKYIFIEVTRETKTTSRGKRIQRLQSKLLNKANGLVPEELKKHKNDLSSERIMLYFLQNGKSLYSEESLNINKLSDYQVDHILPRTYIPDDSLENKALVLAKENQRKADDLLLNSNVIDKNLERWTYMLNNNMMGLKKFKNLTRRVITDKDKLGFIHRQLVQTSQMVKGVANILNSMYKNQGTTCIQARANLSTAFRKALELVKNRNINDFHHAQDAYLASFLGTYRLRRFPTDEMLLMNGEYNKFYGKELYSKKSRKNGFIISPLVNGTTQDRNTGEIIWNVGFRDKILKIFNYHQCNVTRKTEIKTGQFYDQTIYSPKNPKKLIAQKKDMDPNIYGGFSGDNKSSITIVKIDNNKIKPVAIPIRLINDKKTLQNWLEENVKHKKSIQIIKNNVPIGQIIYSKKVGLLSREIANRQQLILPPEHSALLRILQIPDEDPDQILAFYDKNILVEILQELITKMKKFYPFYKNEQEFLASFNQATTSEKINSLEELITLLHANSTSAHLIFNNIEKKAFGRKTHGLTDTDFIYQSVTGLYETRIHIE

SEQ ID NO: 234 - protein, 1327 aa, Listeria innocua
MKKPYTIGLDIGTNSVGWAVLTDQYDLVKRKMKIAGDSEKKQIKKNFWGVRLFDEGQTAADRRMARTARRRIERRRNRISYLQGIFAEEMSKTDANFFCRLSDSFYVDNEKRNSRHPFFATIEEEVEYHKNYPTIYHLREELVNSSEKADLRLVYLALAHIIKYRGNFLIEGALDTQNTSVDGIYKQFIQTYNQVFASGIEKLEDNKDVAKILVEKVTRKEKLERILKLYPGEKSAGMFAQFISLIVGSKGNFQKPFDLIEKSDIECAKDSYEEDLESLLALIGDEYAELFVAAKNAYSAVVLSSIITVAETETNAKLSASMIERFDTHEEDLGELKAFIKLHLPKHYEEIFSNTEKHGYAGYIDGTKQADFYKYMKMTLENIEGADYFIAKIEKENFLRKQRTFDNGAIPHQLHLEELEAILHQQAKYYPFLKENYDKIKSLVTFRIPYFVGPLANGQSEFAWLTRKADGEIRPWNIEEKVDFGKSAVDFIEKMTNKDTYLPKENVLPKHSLCYQKYLVYNELTKVRYINDQGKTSYFSGQEKEQIFNDLFKQKRKVKKKDLELFLRNMSHVESPTIEGLEDSFNSSYSTYHDLLKVGIKQEILDNPVNTEMLENIVKILTVFEDKRMIKEQLQQFSDVLDGVVLKKLERRHYTGWGRLSAKLLMGIRDKQSHLTILDYLMDDGLNRNLMQLINDSNLSFKSIIEKEQVTTADKDIQSIVADLAGSPAIKKGILQSLKIVDELVSVMGYPPQTIVVEMARENQTTGKGKNNSRPRYKSLEKAIKEFGSQILKEHPTDNQELRNNRLYLYYLQNGKDMYTGQDLDIHNLSNYDIDHIVPQSFITDNSIDNLVLTSSAGNREKGDDVPPLEIVRKRKVFWEKLYQGNLMSKRKFDYLTKAERGGLTEADKARFIHRQLVETRQITKNVANILHQRFNYEKDDHGNTMKQVRIVTLKSALVSQFRKQFQLYKVRDVNDYHHAHDAYLNGVVANTLLKVYPQLEPEFVYGDYHQFDWFKANKATAKKQFYTNIMLFFAQKDRIIDENGEILWDKKYLDTVKKVMSYRQMNIVKKTEIQKGEFSKATIKPKGNSSKLIPRKTNWDPMKYGGLDSPNMAYAVVIEYAKGKNKLVFEKKIIRVTIMERKAFEKDEKAFLEEQGYRQPKVLAKLPKYTLYECEEGRRRMLASANEAQKGNQQVLPNHLVTLLHHAANCEVSDGKSLDYIESNREMFAELLAHVSEFAKRYTLAEANLNKINQLFEQNKEGDIKAIAQSFVDLMAFNAMGAPASFKFFETTIERKRYNNLKELLNSTIIYQSITGLYESRKRLDD

SEQ ID NO: 235 - protein, 1327 aa, Listeria innocua
MKKPYTIGLDIGTNSVGWAVLTDQYDLVKRKMKIAGDSEKKQIKKNFWGVRLFDEGQTAADRRMARTARRRIERRRNRISYLQGIFAEEMSKTDANFFCRLSDSFYVDNEKRNSRHPFFATIEEEVEYHKNYPTIYHLREELVNSSEKADLRLVYLALAHIIKYRGNFLIEGALDTQNTSVDGIYKQFIQTYNQVFASGIEKLEDNKDVAKILVEKVTRKEKLERILKLYPGEKSAGMFAQFISLIVGSKGNFQKPFDLIEKSDIECAKDSYEEDLESLLALIGDEYAELFVAAKNAYSAVVLSSIITVAETETNAKLSASMIERFDTHEEDLGELKAFIKLHLPKHYEEIFSNTEKHGYAGYIDGTKQADFYKYMKMTLENIEGADYFIAKIEKENFLRKQRTFDNGAIPHQLHLEELEAILHQQAKYYPFLKENYDKIKSLVTFRIPYFVGPLANGQSEFAWLTRKADGEIRPWNIEEKVDFGKSAVDFIEKMTNKDTYLPKENVLPKHSLCYQKYLVYNELTKVRYINDQGKTSYFSGQEKEQIFNDLFKQKRKVKKKDLELFLRNMSHVESPTIEGLEDSFNSSYSTYHDLLKVGIKQEILDNPVNTEMLENIVKILTVFEDKRMIKEQLQQFSDVLDGVVLKKLERRHYTGWGRLSAKLLMGIRDKQSHLTILDYLMDDGLNRNLMQLINDSNLSFKSIIEKEQVTTADKDIQSIVADLAGSPAIKKGILQSLKIVDELVSVMGYPPQTIVVEMARENQTTGKGKNNSRPRYKSLEKAIKEFGSQILKEHPTDNQELRNNRLYLYYLQNGKDMYTGQDLDIHNLSNYDIDHIVPQSFITDNSIDNLVLTSSAGNREKGDDVPPLEIVRKRKVFWEKLYQGNLMSKRKFDYLTKAERGGLTEADKARFIHRQLVETRQITKNVANILHQRFNYEKDDHGNTMKQVRIVTLKSALVSQFRKQFQLYKVRDVNDYHHAHDAYLNGVVANTLLKVYPQLEPEFVYGDYHQFDWFKANKATAKKQFYTNIMLFFAQKDRIIDENGEILWDKKYLDTVKKVMSYRQMNIVKKTEIQKGEFSKATIKPKGNSSKLISRKTNWDPMKYGGLDSPNMAYAVVIEYAKGKNKLVFEKKIIRVTIMERKAFEKDEKAFLEEQGYRQPKVLAKLPKYTLYECEEGRRRMLASANEAQKGNQQVLPNHLVTLLHHVANCEVSDGKSLDYIESNREMFAELLAHVSEFAKRYTLAEANLNKINQLFEQNKEGDIKAIAQSFVDLMAFNAMGAPASFKFFETTIERKRYNNLKELLNSTIIYQSITGLYESRKRLDD

SEQ ID NO: 236 - protein, 1327 aa, Listeria innocua; identical to SEQ ID NO: 235

SEQ ID NO: 237 - protein, 1101 aa, Listeria innocua
LKLYPGEKSTGMFAQFISLIVGSKGNFQKPFDLIEKSDIECAKDSYEEDLESLLALIGDEYAELFVAAKNAYSAVVLSSIITVAETETNAKLSASMIERFDTHEEDLGELKAFIKLHLPKHYEEIFSNTEKHGYAGYIDGTKQADFYKYMKTTLENIEGADYFIAKIEKENFLRKQRTFDNGAIPHQLHLEELEAILHQQAKYYPFLKENYDKIKSLVTFRIPYFVGPLANGQSEFAWLTRKADGEIRPWNIEEKVDFGKSAVDFIEKMTNKDTYLPKENVLPKHSLCYQKYLVYNELTKVRYINDQGKTSYFSGQEKEQIFNDLFKQKRKVKKKDLELFLRNMSHVESPTIEGLEDSFNSSYSTYHDLLKVGIKQEILDNPVNTEMLENIVKILTVFEDKRMIKEQLQQFSDVLDGVVLKKLERRHYTGWGRLSAKLLMGIRDKQSHLTILDYLMDDGLNRNLMQLINDSNLSFKSIIEKEQVTTADKDIQSIVADLAGSPAIKKGILQSLKIVDELVSVMGYPPQTIVVEMARENQTTGKGKNNSRPRYKSLEKAIKEFGSQILKEHPTDNQELKNNRLYLYYLQNGKDMYTGQDLDIHNLSNYDIDHIVPQSFITDNSIDNLVLTSSAGNREKGNDVPPLEIVQKRKVFWEKLYQGNLMSKRKFDYLTKAERGGLTEADKARFIHRQLVETRQITKNVANILHQRFNYGKDDHGNTMKQVRIVTLKSALVSQFRKQFQLYKVRGVNDYHHAHDAYLNGVVANTLLKVYPQLEPEFVYGDYHQFDWFKANKATAKKQFYTNIMLFFAQKDRIIDENGEILWDKKYLDTVKKVMSYRQMNIVKKTEIQKGEFSKATIKPKGNSSKLIPRKTNWDPMKYGGLDSPNMAYAVVIEYAKGKNKLVFEKKIIRVTIMERKAFEKDEKAFLEEQGYRQPKVLAKLPKYTLYECEEGRRRMLASANEAQKGNQQVLPNHLVTLLHHAANCEVSDGKSLDYIESNREMFAELLAHVSEFAKRYTLAEANLNKINQLFEQNKEGDIKAIAQSFVDLMAFNAMGAPASFKFFETTIERKRYNNLKELLNSTIIYQSITGLYESRKRLDD

SEQ ID NO: 238 - protein, 1327 aa, Listeria ivanovii
MRKPYTIGLDIGTNSVGWAVLTDQYNLVKRKMKVAGSAEKKQIKKNFWGVRLFDEGEVAAGRRMNRTTRRRIERRRNRIAYLQEIFAAEMAEVDANFFYRLEDSFYIESEKRHSRHPFFATIEEEVAYHEEYKTIYHLREKLVNSSDKADLRLVYLALAHIIKYRGNFLIEGMLDTKNTSVDEVFKQFIQTYNQIFASDIERLEENKEVAEILSEKLTRREKLDKILKLYTGEKSTGMFARFINLIIGSKGDFKKVFDLDEKAEIECAKDTYEEDLEALLAKIGDEYAEIFVAAKSTYNAVVLSNIITVTDTETKAKLSASMIERFDKHAKDLKRLKAFFKMQLPEKFNEVFNDIEKDGYAGYIDGTTQEKFYKYMKKMLANIDGADYFIDQIEEENFLRKQRTFDNGTIPHQLHLEELEAILHQQAKYYPFLRKDYEKIRSLVTFRIPYFIGPLANGQSDFAWLTRKADGEIRPWNIEEKVDFGKSAIDFIEKMTNKDTYLPKENVLPKHSLCYQKYMVYNELTKIRYIDDQGKTHHFSGQEKQQIFNGLFKQQRKVKKKDLERFLYTINHIESPTIEGVEDAFNSSFATYHDLQKGGVTQEILDNPLNADMLEEIVKILTVFEDKRMIKEQLQSFSDVLDGTILKKLERRHYTGWGRLSAKLLTGIRDKHSHLTILDYLMDDGLNRNLMQLINDSNLSFKSIIEKEQVSTADKGIQSIVAELAGSPAIKKGILQSLKIVDELVGIMGYPPQTIVVEMARENQTTGKGKNNSKPRFISLEKAIKEFGSQILKEHPTDNQCLKNDRLYLYYLQNGKDMYTGKELDIHNLSNYDIDHIIPQSFITDNSIDNRVLVSSTANREKGDNVPLLEVVRKRKAFWEKLYQAKLMSKRKFDYLTKAERGGLTEADKANFIQRQLVETRQITKNVANILYQRFNCKQDENGNEVEQVRIVTLKSTLVSQFRKQFQLYKVREVNDYHHAHDAYLNGVVANTLLKVYPQLEPEFVYGDYHQFDWFKANKATAKKQFYTNIMRFFAKENQIIDKNGEILWDNRYLDTIKKVLSYRQMNIVKKTEIQKGEFSNATVNPKGNSSKLISRKADWNPIKYGGFDGSNMAYSIVIEYEKRKKKTVIKKELIQINIMERVAFEKDQKAFLEEKGYYSPKVLTKIPKYTLYECENGRRRMLGSANEAQKGNQMVLPNHLMTLLYHAKNCEANDGESLAYIEMHREMFAELLAYISEFAKRYTLANDRLEKINMFFEQNKKGDIKVIAKSFDKLKVFNAFGAPRDFEFFETTIKRKRYYNIKELLNATIIYQSITGLYEARKRLED

SEQ ID NO: 239 - protein, 952 aa, Listeria ivanovii
MKKMLANIDGADYFIDQIEEENFLRKQRTFDNGTIPHQLHLEELEAILHQQAKYYPFLRKDYEKIRSLVTFRIPYFIGPLANGQSDFAWLTRKADGEIRPWNIEEKVDFGKSAIDFIEKMTNKDTYLPKENVLPKHSLCYQKYMVYNELTKIRYIDDQGKTHHFSGQEKQQIFNGLFKQQRKVKKKDLERFLYTINHIESPTIEGVEDAFNSSFATYHDLQKGGVTQEILDNPLNADMLEEIVKILTVFEDKRMIKEQLQSFSDVLDGTILKKLERRHYTGWGRLSAKLLTGIRDKHSHLTILDYLMDDGLNRNLMQLINDSNLSFKSIIEKEQVSTADKGIQSIVAELAGSPAIKKGILQSLKIVDELVGIMGYPPQTIVVEMARENQTTGKGKNNSKPRFISLEKAIKEFGSQILKEHPTDNQCLKNDRLYLYYLQNGKDMYTGKELDIHNLSNYDIDHIIPQSFITDNSIDNRVLVSSTANREKGDNVPLLEVVRKRKAFWEKLYQAKLMSKRKFDYLTKAERGGLTEADKANFIQRQLVETRQITKNVANILYQRFNCKQDENGNEVEQVRIVTLKSTLVSQFRKQFQLYKVREVNDYHHAHDAYLNGVVANTLLKVYPQLEPEFVYGDYHQFDWFKANKATAKKQFYTNIMRFFAKENQIIDKNGEILWDNRYLDTIKKVLSYRQMNIVKKTEIQKGEFSNATVNPKGNSSKLISRKADWNPIKYGGFDGSNMAYSIVIEYEKRKKKTVIKKELIQINIMERVAFEKDQKAFLEEKGYYSPKVLTKIPKYTLYECENGRRRMLGSANEAQKGNQMVLPNHLMTLLYHAKNCEANDGESLAYIEMHREMFAELLAYISEFAKRYTLANDRLEKINMFFEQNKKGDIKVIAKSFDKLKVFNAFGAPRDFEFFETTIKRKRYYNIKELLNATIIYQSITGLYEARKRLED

SEQ ID NO: 240 - protein, 1327 aa, Listeria monocytogenes
MKNPYTIGLDIGTNSVGWAVLTNQYDLVKRKMKVAGNSDKKQIKKNFWGVRLFDDGQTAVDRRMNRTARRRIERRRNRISYLQEIFAVEMANIDANFFCRLNDSFYVDSEKRNSRHPFFATIEEEVAYHDNYRTIYHLREKLVNSSEKADLRLVYLALAHIIKYRGNFLIEGALDTKNTSVDEVYKQFIETYNQVFMSNIEKVEENIEVANILAGKFTRREKFERILQLYPGEKSTGMFAQFISLIVGSKGNFQKVFDLIEKTDIECAKDSYEEDLETLLAIIGDEYAELFVAAKNTYNAVVLSSIITVTDTETNAKLSASMIERFDAHEKDLVELKAFIKLNLPKQYEEIFSNAAIDGYAGYIDGTKQVDFYKYLKTILENIEGSDYFIAKIEEENFLRKQRTFDNGAIPHQLHLEELEAIIHQQAKYYPFLKEDYDKIKSLVTFRIPYFVGPLANGQSEFAWLTRKADGEIRPWNIEEKVDFGKSAVDFIEKMTNKDTYLPKENVLPKHSLCYQKYMVYNELTKIRYIDDQGKTNYFSGREKQQVFNDLFKQKRKVKKKDLELFLRNINHIESPTIEGLEDSFNASYATYHDLLKVGMKQEILDNPLNTEMLEDIVKILTVFEDKPMIKEQLQQFSDVLDGGVLKKLERRHYTGWGRLSAKLLVGIREKQSHLTILDYLMDDGLNRNLMQLINDSNLSFKSIIEKEQVSTTDKDLQSIVAELAGSPAIKKGILQSLKIVDELVSIMGYPPQTIVVEMARENQTTGKGKNNSKPRYKSLEKAIKEFGSQILKEHPTDNQELKNNRLYLYYLQNGKDMYTGQELDIHNLSNYDIDHIVPQSFITDNSIDNLVLTSSAGNREKGGDVPPLEIVRKRKVFWEKLYQGNLMSKRKFDYLTKAERGGLTEADKARFIHRQLVETRQITKNVANILYQRFNKETDNHGNTMEQVRIVTLKSALVSQFRKQFQLYKVREVNGYHHAHDAYLNGVVANTLLKVYPQLEPEFVYGEYHQFDWFKANKATAKKQFYTNIMLFFAQKERIIDENGEILWDKKYLETIKKVLDYRQMNIVKKTEIQKGEFSKATIKPKGNSSKLIPRKENWDPMKYGGLDSPNMAYAVIIEHAKGKKKIVIEKKLIQINIMERKMFEKDEEAFLEEKGYRHPKVLTKLPKYTLYECEKGRRRMLASANEAQKGNQLVLSNHLVSLLYHAKNCEASDGKSLKYIEAHRETFSELLAQVSEFATRYTLADANLSKINNLFEQNKEGDIKAIAQSFVDLMAFNAMGAPASFKFFEATIDRKRYTNLKELLSSTIIYQSITGLYESRKRLDD

SEQ ID NO: 241 - protein, 1327 aa, Listeria monocytogenes
MKNPYTIGLDIGTNSVGWAVLTDQYDLVKRKMKVAGNSDKKQIKKNFWGVRLFDDGQTAVDRRMNRTARRRIERRRNRISYLQEIFAVEMANIDANFFCRLNDSFYVDSEKRNSRHPFFATIEEEVAYHKNYRTIYHLREELVNSSEKADLRLVYLALAHIIKYRGNFLIEGALDTKNTSVDEVYKQFIQTYNQVFMSNIEKVEENTEVASILAGKFTRREKFERILRLYPGEKSTGMFAQFISLIVGNKGNFQKVFNLVEKTDIECAKDSYEEDLEALLAIIGDEYAELFVAAKNTYNAVVLSSIITVTATETNAKLSASMIERFDAHEKELGELKAFIKLHLPKQYQEIFNNAEIDGYAGYIDGTKQVDFYKYLKTTLENVEGADYFITKIEEENFLRKQRTFDNGVIPHQLHLEELEAILHQQAKYYPFLREGYDKIKSLVTFRIPYFVGPLANGQSEFAWLTRKDDGEIRPWNIEEKVDFGKSAVDFIEKMTNKDTYLPKENVLPKHSLCYQKYMVYNELTKIRYIDDQGKTNYFSGREKQQIFNDLFKQKRKVKKKDLELFLRNINHIESPTIEGLEDSFNASYATYHDLLKVGLKQEILDNPLNTEILEDIVKILTVFEDKRMIKEQLEQFSDVLDGVVLKKLERRHYTGWGRLSAKLLVGIRDKQSHLTILDYLMDDGLNRNLMQLINDSNLSFKSIIEKEQVSTTDKDLQSIVADLAGSPAIKKGILQSLKIVDELVSIMGYPPQTIVVEMARENQTTGKGKNNSKPRYKSLEKAIKDFGSQILKEHPTDNQELKNNRLYLYYLQNGKDIYTGQELDIHNLSNYDIDHIVPQSFITDNSIDNLVLTSSAGNREKGGDVPPLEIVRKRKVFWEKLYQGNLMSKRKFDYLTKAERGGLTEADKARFIHRQLVETRQITKNVANILHQRFNKETDNHGNTMEQVRIVTLKSALVSQFRKQFQLYKVREVNDYHHAHDAYLNGVVANTLLKVYPQLEPEFVYGEYHQFDWFKANKATAKKQFYTNIMLFFAQKERIIDENGEILWDKKYLETIKKVLDYRQINIVKKTEIQKGEFSKATIKPKGNSSKLIPRKENWDPMKYGGLDSPNMAYAVIIEHAKGKKKIVIEKKLIQINIMERKMFEKDEEAFLEEKGYHQPKVLTKLPKYTLYECEKGRRRMLSSANEAQKGNQLVLSNHLVSLLYHAKNCEASDGKSLKYIEAHRETFSELLAQVSEFATKYTLADANLSKINNLFEQNKEGDIKAIAQSFVDLMAFNAMGAPASFKFFEATIDRKRYTNLKELLSSTIIYQSITGLYESRKRLDD

SEQ ID NO: 242 - protein, 1327 aa, Listeria monocytogenes
MKNPYTIGLDIGTNSVGWAVLTDQYDLVKRKMKVAGNSDKKQIKKNFWGVRLFDDGQTAVDRRMNRTARRRIERRRNRISYLQEIFAVEMANIDANFFCRLNDSFYVDSEKRNSRHPFFATIEEEVAYHKNYRTIYHLREELVNSSEKADLRLVYLALAHIIKYRGNFLIEGALDTKNTSVDEVYKQFIQTYNQVFMSNIEKVEENTEVASILAGKFTRREKFERILRLYPGEKSTGMFAQFISLIVGNKGNFQKVFNLVEKTDIECAKDSYEEDLEALLAIIGDEYAELFVAAKNTYNAVVLSSIITVTATETNAKLSASMIERFDAHEKELGELKAFIKLHLPKQYQEIFNNAEIDGYAGYIDGTKQVDFYKYLKTTLENVEGADYFITKIEEENFLRKQRTFDNGVIPHQLHLEELEAILHQQAKYYPFLREGYDKIKSLVTFRIPYFVGPLANGQSEFAWLTRKDDGEIRPWNIEEKVDFGKSAVDFIEKMTNKDTYLPKENVLPKHSLCYQKYMVYNELTKIRYIDDQGKTNYFSGREKQQIFNDLFKQKRKVKKKDLELFLRNINHIESPTIEGLEDSFNASYATYHDLLKVGLKQEILDNPLNTEILEDIVKILTVFEDKRMIKEQLEQFSDVLDGVVLKKLERRHYTGWGRLSAKLLVGIRDKQSHLTILDYLMDDGLNRNLMQLINDSNLSFKSIIEKEQVSTTDKDLQSIVADLAGSPAIKKGILQSLKIVDELVSIMGYPPQTIVVEMARENQTTGKGKNNSKPRYKSLEKAIKDFGSQILKEHPTDNQELKNNRLYLYYLQNGKDIYTGQELDIHNLSNYDIDHIVPQSFITDNSIDNLVLTSSAGNREKGGDVPPLEIVRKRKVFWEKLYQGNLMSKRKFDYLTKAERGGLTEADKARFIHRQLVETRQITKNVANILHQRFNKETDNHGNTMEQVRIVTLKSALVSQFRKQFQLYKVREVNDYHHAHDAYLNGVVANTLLKVYPQLEPEFVYGEYHQFDWFKANKATAKKQFYTNIMLFFAQKERIIDENGEILWDKKYLETIKKVLDYRQINIVKKTEIQKGEFSKATIKPKGNSSKLIPRKENWDPVKYGGLDSPNMAYAVIIEHAKGKKKIVIEKKLIQINIMERKMFEKDEEAFLEEKGYHQPKVLTKLPKYTLYECEKGRRRMLSSANEAQKGNQLVLSNHLVSLLYHAKNCEASDGKSLKYIEAHRETFSELLAQVSEFATKYTLADANLSKINNLFEQNKEGDIKAIAQSFVDLMAFNAMGAPASFKFFEATIDRKRYTNLKELLSSTIIYQSITGLYESRKRLDD

SEQ ID NO: 243 - protein, 1327 aa, Listeria monocytogenes
MKKPYTIGLDIGTNSVGWAVLTDQYDLVKRKMKISGDSEKKQIKKNFWGVRLFEKGETAAKRRMSRTARRRIERRRNRISYLQEIFAIQMNEVDDNFFNRLKESFYAESDKKYNRHPFFGTVEEEVAYYKDFPTIYHLRKELIDSQKKADLRLVYLALAHIIKYRGHFLIEGALDTKNTSIDEMFKQFLQIYNQVFANDIEKTEKNQEVAQILAEKFTRKDKLDKILSLYPGEKTTGVFAQFVNIIVGSTGKFKKHFNLHEKKDINCAEDTYDTDLESLLAIIGDEFAEVFVAAKNAYNAVVLSNIITVTDSTTRAKLSASLIERFENHKEDLKKMKRFVRTYLPEKYDEIFDDTEKHGYAGYISGTKQADFYKYMKATLEKIEGADYFIAKIEEENFLRKQRTFDNGVIPHQLHLEELEAILHQQAKYYPFLREDYEKIKSLVTFRIPYFVGPLAKGQSEFAWLTRKADGEIRPWNIEEKVDFGKSAVDFIEKMTNKDTYLPKENVLPKHSLCYQKYMVYNELTKVRYIDDQGKTNYFSGQEKQQIFNDLFKQKRKVKKKDLELFLRNINQIESPTIEGLEDSFNASYATYHDLLKVGMKQEILDNPLNTEMLEDIVKILTVFEDKRMIKEQLQQFSDVLDGTVLKKLERRHYTGWGRLSAKLLVGIRDKQSHLTILDYLMDDGLNRNLMQLINDSNLSFKSIIEKEQVSTTDKDLQSIVAELAGSPAIKKGILQSLKIVDELVSVMGYPPQTIVVEMARENQTTNKGKNNSKPRYKSLEKAIKEFGSQILKEHPTDNQELKNNRLYLYYLQNGKDMYTGQELDIHNLSNYDIDHIVPQSFITDNSVDNLVLTSSAGNREKGDNVPPLEIVQKRKIFWEKLYQGNLMSKRKFDYLTKAERGGLTEADKARFIHRQLVETRQITKNVANILHQRFNYKTDGNKDTMETVRIVTLKSALVSQFRKQFQFYKVREVNDYHHAHDAYLNGVVANTLLKVYPQLEPEFVYGEYHQFGWFKANKATAKKQFYTNIMLFFAQKDRIIDENGEILWDKRYLETVKKVLGYRQMNIVKKTEIQKGEFSNVTPNPKGKSNKLIPRKKDWDPIKYGGFDGSKMAYAIIIEYEKQKRKVRIEKKLIQINIMEREAFEKDEKTFLEEKGYHQPKVLIKVPKYTLYECKNGRRRMLGSANEAHKGNQMLLPNHLMALLYHAEKYEAIDGESLAYIEVHRALFDELLAYISEFARKYTLSNDRLDEINMLYERNKDGDVKSIAESFVSLKKFNAFGVHQDFSFFGTKIERKRDRKLNELLNSTIIYQSITGLYESRKRLDN

SEQ ID NO: 244 - protein, 1327 aa, Listeria monocytogenes
MKNPYTIGLDIGTNSVGWAVLTDQYDLVKRKMKVAGNSDKKQIKKNFWGVRLFDEGETAADRRMNRTARRRIERRRNRISYLQEIFALEMANIDANFFCRLNDSFYVDSEKRNSRHPFFATIEEEVAYHKNYRTIYHLREELVNSSEKADLRLVYLALAHIIKYRGNFLIEGALDTKNTSVDGVYKQFIQTYNQVFISNIEKMEENTTVADILAGKFTRKEKLERILQLYPGEKSTGMFAQFISLIVGSKGNFQKVFDLVEKTDIECAKDSYEEDLEALLAIIGDEYAELFVAAKNTYNAVVLSSIITVTDTETNAKLSASMIERFDAHEKDLSELKAFIKLHLPKQYEEIFSNVAIDGYAGYIDGTKQVDFYKYLKTLLENIEGADYFIAKIEEENFLRKQRTFDNGAIPHQLHLEELEAILHQQAKYYPFLKEAYDKIKSLVTFRIPYFVGPLANGQSDFAWLTRKADGEIRPWNIEEKVDFGKSAVDFIEKMTNKDTYLPKENVLPKHSLYYQKYMVYNELTKVRYIDDQGKTNYFSGQEKQQIFNDYFKQKRKVSKKDLEQFLRNMSHIESPTIEGLEDSFNSSYATYHDLLKVGIKQEVLENPLNTEMLEDIVKILTVFEDKRMIKEQLQQFSDVLDGAVLKKLERRHYTGWGRLSAKLLVGIRDKQSHLTILDYLMDDGLNRNLMQLINDSNLSFKSIIEKEQVSTTDKDLQSIVADLAGSPAIKKGILQSLKIVDELVSIMGYPPQTIVVEMARENQTTVKGKNNSRPRYKSLEKAIKEFGSQILKEHPTDNQELRNNRLYLYYLQNGKDMYTGQELDIHNLSNYDIDHIVPQSFITDNSIDNLVLTSSAGNREKGDDVPPLEIVRKRKVFWEKLFQGNLMSKRKFDYLTKAERGGLTEADKATFIHRQLVETRQITKNVANILHQRFNNETDNHGNNMEQVRIVMLKSALVSQFRKQFQLYKVREVNDYHHAHDAYLNGVVANTLLKVYPQLEPEFVYGEYHQFDWFKANKATAKKQFYTNIMLFFAQKERIIDENGEILWDKKYLETIKKVLDYRQMNIVKKTEIQKGEFSKATIKPKGNSSKLIPRKENWDPMKYGGLDSPNMAYAVIIEHAKGKKKVVFEKKIIRITIMERKAFEKDEKSFLEKQGYRQPKVLTKLPKYTLYECENGRRRMLASANEAQKGNQQVLKGQLITLLHHAKNCEASDGKSLDYIESNREMFGELLAHVSEFAKRYTLADANLSKINQLFEQNKDNDIKVIAQSFVNLMAFNAMGAPASFKFFEATIERKRYTNLKELLSATIIYQSITGLYEARKRLDG

SEQ ID NO: 245 - protein, 1327 aa, Listeria monocytogenes
MKNPYTIGLDIGTNSVGWAVLTNQYDLVKRKMKVAGNSDKKQIKKNFWGVRLFDDGQTAVDRRMNRTARRRIERRRNRISYLQEIFAVEMANIDANFFCRLNDSFYVDSEKRNSRHPFFATIEEEVAYHKNYRTIYHLREELVNSSEKADLRLVYLALAHIIKYRGNFLIEGALDTKNTSVDGVYEQFIQTYNQVFMSNIEKVEENIEVANILAGKFTRREKFERILQLYPGEKSTGMFAQFISLIVGSKGNFQKVFDLIEKTDIECAKDSYEEDLEALLAIIGDEYAELFVAAKNTYNAVVLSSIITVTATETNAKLSASMIERFDAHEKDLGELKAFIKLHLPKQYQEIFNNAAIDGYAGYIDGTKQVDFYKYLKTILENIEGADYFIAKIEEENFLRKQRTFDNGAIPHQLHLEELEAIIHQQAKYYPFLREDYEKIKSLVTFRIPYFVGPLAKGQSEFAWLTRKADGEIRPWNIEEKVDFGKSAVDFIEKMTNKDTYLPKENVLPKHSLCYQKYMVYNELTKVRYIDDQGKTNYFSGQEKQQIFNDLFKQKRKVKKKDLELFLRNINHIESPTIEGLEDSFNASYATYHDLLKVGMKQEILDNPLNTEMLEDIVKILTVFEDKPMIKEQLQQFSDVLDGGVLKKLERRHYTGWGRLSAKLLVGIREKQSHLTILDYLMDDGLNRNLMQLINDSNLSFKSIIEKEQVSTTDKDLQSIVADLAGSPAIKKGILQSLKIVDELVSIMGYPPQTIVVEMARENQTTGKGKNNSKPRYKSLEKAIKEFGSKILKEHPTDNQELKNNRLYLYYLQNGKDMYTGQELDIHNLSNYDIDHIVPQSFITDNSIDNLVLTSSAGNREKGGDVPPLEIVRKRKVFWEKLYQGNLMSKRKFDYLTKAERGGLTDADKARFIHRQLVETRQITKNVANILHQRFNNETDNHGNTMEQVRIVTLKSALVSQFRKQFQLYKVREVNDYHHAHDAYLNGVVANTLLKVYPQLEPEFVYGEYHQFDWFKANKATAKKQFYTNIMLFFGQKERIIDENGEILWDKKYLETIKKVLDYRQMNIVKKTEIQKGEFSKATIKPKGNSSKLIPRKENWDPMKYGGLDSPNMAYAVIIEHAKGKKKLIFEKKIIRITIMERKMFEKDEEAFLEEKGYRHPKVLTKLPKYTLYECEKGRRRMLASANEAQKGNQLVLSNHLVSLLYHAKNCEASDGKSLKYIEAHRETFSELLAQVSEFATRYTLADANLSKINNLFEQNKEGDIQAIAQSFVDLMAFNAMGAPASFKFFEATIDRKRYTNLKELLSSTIIYQSITGLYESRKRLDD

SEQ ID NO: 246 - protein, 1327 aa, Listeria monocytogenes
MKNPYTIGLDIGTNSVGWAVLTNQYDLVKRKMKVAGNSDKKQIKKNFWGVRLFDDGQTAVDRRMNRTARRRIERRRNRISYLQEIFAVEMANIDANFFCRLNDSFYVDSEKRNSRHPFFATIEEEVAYHKNYRTIYHLREELVNSSEKADLRLVYLALAHIIKYRGNFLIEGALDTKNTSVDGVYEQFILTYNQVFMSNIEKVEENIEVANILAGKFTRREKFERILQLYPGEKSTGMFAQFISLIVGSKGNFQKVFDLIEKTDIECAKDSYEEDLETLLAIIGDEYAELFVAAKNTYNAVVLSSIITVTDTETNAKLSASMIERFDAHEKDLVELKAFIKLNLPKQYEEIFSNAAIDGYAGYIDGTKQVDFYKYLKTTLENVEGADYFITKIEEENFLRKQRTFDNGVIPHQLHLEELEAILHQQAKYYPFLREDYEKIKSLVTFRIPYFVGPLAKGQSEFAWLTRKADGEIRPWNIEEKVDFGKSAVDFIEKMTNKDTYLPKENVLPKHSLCYQKYMVYNELTKIRYIDDQGKTNYFSGQEKQQIFNDLFKQKRKVKKKDLELFLRNINHVESPTIEGLEDSFNASYATYHDLMKVGIKQEILDNPLNTEMLEDIVKILTVFEDKRMIKEQLQQFSDVLDGTVLKKLERRHYTGWGRLSAKLLVGIRDKQSHLTILDYLMDDGLNRNLMQLINDSNLSFKSIIEKEQVSTADKDLQSIVADLAGSPAIKKGILQSLKVVEELVSVMGYPPQTIVVEMARENQTTNKGKNNSKPRYKSLEKAIKEFGSQILKEHPTDNQELKNNRLYLYYLQNGKDMYTGQELDIHNLSNYDIDHIVPQSFITDNSIDNLVLTSSAGNREKGDNVPPLEIVQKRKIFWEKLYQGNLMSKRKFDYLTKAERGGLTEADKARFIHRQLVETRQITKNVANILHQRFNYKTDDNEDTMEPVRIVTLKSALVSQFRKQFQLYKVREVNDYHHAHDAYLNGVVANTLLKVYPQLEPEFVYGEYHQFDWFKANKATAKKQFYTNIMLFFAQKERIIDENGEILWDKKYLETIKKVLNYRQMNIVKKTEIQKGEFSNQNPKPRGDSSKLIPKKTNLNPIKYGGFEGSNMAYAIIIEHEKRKKKVTIEKKLIQINIMERKAFEKDEKVFLEGKGYHQPKVLTKLPKYALYECENGRRRMLGSANEVHKGNQMLLPNHLMTLLYHAEKREAIDGESLAYIEAHKAVFGELLAHISEFARKYTLANDKLDEINMLYERNKDGDVKSIAESFVSLKKFNAFGVHKDFNFFGTTIKRKRDRKLKELLNSTIIYQSITGLYESRKRLDS

SEQ ID NO: 247 - protein, 1327 aa, Listeria monocytogenes
MKNPYTIGLDIGTNSVGWAVLTDQYDLVKRKMKVAGNSDKKQIKKNFWGVRLFDDGQTAVDRRMNRTARRRIERRRNRISYLQEIFAVEMANIDANFFCRLNDSFYVDSEKRNSRHPFFATIEEEVAYHKNYRTIYHLREELVNSSEKADLRLVYLALAHIIKYRGNFLIEGALDTKNTSVDGVYEQFIQTYNQVFMSNIEKVEENIEVANILAGKFTRREKFERILQLYPGEKSTGMFAQFISLIVGSKGNFQKVFDLIEKTDIECAKDSYEEDLETLLAIIGDEYAELFVAAKNTYNAVVLSSIITVNDTETNAKLSASMIERFDAHEKDLVELKAFIKLNLPKQYEEIFSNAAIDGYAGYIDGTKQVDFYKYLKTILENIEGSDYFIAKIEEENFLRKQRTFDNGAIPHQLHLEELEAIIHQQAKYYTFLKEDYDKIKSLVTFRIPYFVGPLANGQSEFAWLTRKADGEIRPWNIEEKVDFGKSAVDFIEKMTNKDTYLPKENVLPKHSLCYQKYMVYNELTKVRYIDDQGKTNYFSGQEKQQIFNDLFKQKRKVKKKDLELFLRNINQIESPTIEGLEDSFNASYATYHDLLKVGMKQEILDNPLNTEMLEDIVKILTVFEDKRMIKEQLQQFSDVLDGVVLKKLERRHYTGWGRLSAKLLVGIRDKQSHLTILEYLMDDGLNRNLMQLINDSNLSFKSIIEKEQVSTTDKDLQSIVAELAGSPAIKKGILQSLKIVDELVSIMGYPPQTIVVEMARENQTTGKGKNNSKPRYKSLEKAIKEFGSQILKEHPTDNQELKNNRLYLYYLQNGKDMYTGQELDIHNLSNYDIDHIVPQSFITDNSIDNLVLTSSAGNREKGGDVPPLEIVRKRKVFWEKLYQGNLMSKRKFDYLTKAERGGLTEADKARFIHRQLVETRQITKNVANILHQRFNKETDNHGNTMEQVRIVTLKSALVSQFRKQFQLYKVREVNDYHHAHDAYLNGVVANTLLKVYPQLEPEFVYGEYHQFDWFKANKATAKKQFYTNIMLFFAQKERIIDENGEILWDKKYLETIKKVLDYRQMNIVKKTEIQKGEFSKATIKPKGNSSKLIPRKENWDPMKYGGLDSPNMAYAVIIEHAKGKKRIVIEKKLIQINIMERKMFEKDEEAFLEEKGYRHPKVLTKLPKYTLYECEKGRRRMLASANEAQKGNQLVLSNHLVSLLYHAKNCEASDGKSLKYIEAHRETFSELLAQVSEFATRYTLADANLSKINNLFEQNKEGDIKAIAQSFVDLMAFNAMGAPASFKFFEATIDRKRYTNLKELLSSTIIYQSITGLYESRKRLDD

SEQ ID NO: 248 - protein, 1327 aa, Listeria monocytogenes
MKKPYTIGLDIGTNSVGWAVLTDQYDLVKRKMKISGDSEKKQIKKNFWGVRLFEKGETAAKRRMSRTARRRIERRRNRISYLQEIFAIQMNEVDDNFFNRLKESFYAESDKKYNRHPFFGTVEEEVAYYKDFPTIYHLRKELIDSQKKADLRLVYLALAHIIKYRGHFLIEGALDTKNTSIDEMFKQFLQIYNQVFANDIEKTEKNQEVAQILAEKFTRKDKLDKILSLYPGEKTTGVFAQFVNIIVGSTGKFKKHFNLHEKKDINCAEDTYDTDLESLLAIIGDEFAEVFVAAKNAYNAVVLSNIITVTDSTTRAKLSASLIERFENHKEDLKKMKRFVRTYLPEKYDEIFDDTEKHGYAGYISGTKQADFYKYMKATLEKIEGADYFIAKIEEENFLRKQRTFDNGVIPHQLHLEELEAILHQQAKYYPFLREDYEKIKSLVTFRIPYFVGPLAKGQSEFAWLTRKADGEIRPWNIEEKVDFGKSAVDFIEKMTNKDTYLPKENVLPKHSLCYQKYMVYNELTKVRYIDDQGKTNYFSGQEKQQIFNDLFKQKRKVKKKDLELFLRNINQIESPTIEGLEDSFNASYATYHDLLKVGMKQEILDNPLNTEMLEDIVKILTVFEDKRMIKEQLQQFSDVLDGTVLKKLERRHYTGWGRLSAKLLVGIRDKQSHLTILDYLMDDGLNRNLMQLINDSNLSFKSIIEKEQVSTADKDLQSIVADLAGSPAIKKGILQSLKIVDELVSVMGYPPQTIVVEMARENQTTNKGKNNSKPRYKSLEKAIKEFGSQILKEHPTDNQELKNNRLYLYYLQNGKDMYTGQELDIHNLSNYDIDHIVPQSFITDNSVDNLVLTSSAGNREKGDNVPPLEIVQKRKIFWEKLYQGNLMSKRKFDYLTKAERGGLTEADKARFIHRQLVETRQITKNVANILHQRFNYKTDGNKDTMETVRIVTLKSALVSQFRKQFQFYKVREVNDYHHAHDAYLNGVVANTLLKVYPQLEPEFVYGEYHQFDWFKANKATAKKQFYTNIMLFFAQKDRIIDENGEILWDKRYLETVKKVLGYRQMNIVKKTEIQKGEFSNVTPNPKGKSNKLIPRKKDWDPIKYGGFDGSKMAYAIIIEYEKQKRKVRIEKKLIQINIMEREAFEKDEKTFLEEKGYHQPKVLIKVPKYTLYECENGRRRMLGSANEAHKGNQMLLPNHLMALLYHAEKYEAIDGESLAYIEVHRALFDELLAYISEFARKYTLSNDRLDEINMLYERNKDGDVKSIAESFVSLKKFNAFGVHQDFSFFGTKIERKRDRKLNELLNSTIIYQSITGLYESRKRLDN

SEQ ID NO: 249 - protein, 1327 aa, Listeria monocytogenes
MKNPYTIGLDIGTNSVGWAVLTNQYDLVKRKMKVAGNSDKKQIKKNFWGVRLFDDGQTAVDRRMNRTARRRIERRRNRISYLQEIFAVEMANIDANFFCRLNDSFYVDSEKRNSRHPFFATIEEEVAYHKNYRTIYHLREELVNSSEKADLRLVYLALAHIIKYRGNFLIEGALDTKNTSVDGVYEQFIQTYNQVFMSNIEKVEENIEVANILARKFTRREKFERILQLYPGEKSTGMFAQFISLIVGSKGNFQKVFDLIEKTDIECAKDSYEEDLETLLAIIGDEYAELFVAAKNTYNAVVLSSIITVTDTETNAKLSASMIERFDAHEKDLVELKAFIKLNLPKQYEEIFSNAAIDGYAGYIDGTKQVDFYKYLKTILENIEGADYFIAKIEEENFLRKQRTFDNGAIPHQLHLEELEAIIHQQAKYYPFLREDYEKIKSLVTFRIPYFVGPLAKGQSEFAWLTRKADGEIRPWNIEEKVDFGKSAVDFIEKMTNKDTYLPKENVLPKHSLCYQKYMVYNELTKIRYIDDQGKTNYFSGQEKQQIFNDLFKQKRKVKKKDLELFLRNINHVESPTIEGLEDSFNASYATYHDLMKVGIKQEILDNPLNTEMLEDIVKILTVFEDKRMIKEQLQQFSDVLDGTVLKKLERRHYTGWGRLSAKLLVGIRDKQSHLTILDYLMDDGLNRNLMQLINDSNLSFKSIIEKEQVSTADKDLQSIVADLAGSPAIKKGILQSLKVVEELVSVMGYPPQTIVVEMARENQTTNKGKNNSKPRYKSLEKAIKEFGSQILKEHPTDNQELKNNRLYLYYLQNGKDMYTGQELDIHNLSNYDIDHIVPQSFITDNSIDNLVLTSSAGNREKGDNVPPLEIVQKRKIFWEKLYQGNLMSKRKFDYLTKAERGGLTEADKARFIHRQLVETRQITKNVANILHQRFNYKTDDNEDTMEPVRIVTLKSALVSQFRKQFQLYKVREVNDYHHAHDAYLNGVVANTLLKVYPQLEPEFVYGEYHQFDWFKANKATAKKQFYTNIMLFFAQKERIIDENGEILWDKKYLETIKKVLNYRQMNIVKKTEIQKGEFSNQNPKPRGDSSKLIPKKTNLNPIKYGGFEGSNMAYAIIIEHEKRKKKVTIEKKLIQINIMERKAFEKDEKVFLEGKGYHQPKVLTKLPKYALYECENGRRRMLGSANEVHKGNQMLLPNHLMTLLYHAEKREAIDGESLAYIEAHKAVFGELLAHISEFARKYTLANDKLDEINMLYERNKDGDVKSIAESFVSLKKFNAFGVHKDFNFFGTTIKRKRDRKLKELLNSTIIYQSITGLYESRKRLDS

SEQ ID NO: 250 - protein, 1327 aa, Listeria monocytogenes; identical to SEQ ID NO: 245

SEQ ID NO: 251 - protein, 1327 aa, Listeria monocytogenes; identical to SEQ ID NO: 249

SEQ ID NO: 252 - protein, 781 aa, Listeria monocytogenes
  misc_feature (721)..(721): Xaa can be any naturally occurring amino acid
IFNDLFKQKRKVKKKDLELFLRNINQIESPTIEGLEDSFNASYATYHDLLKVGMKQEILDNPLNTEMLEDIVKILTVFEDKRMIKEQLQQFSDVLDGVVLKKLERRHYTGWGRLSAKLLVGIRDKQSHLTILEYLMDDGLNRNLMQLINDSNLSFKSIIEKEQVSTTDKDLQSIVADLAGSPAIKKGILQSLKIVDELVSIMGYPPQTIVVEMARENQTTVKGKNNSRPRYKSLEKAIKEFGSQILKEHPTDNQELKNNRLYLYYLQNGKDIYTGQELDIHNLSNYDIDHIVPQSFITDNSIDNLVLTSSAGNREKGDDVPPLEIVRKRKVFWEKLYQGNLMSKRKFDYLTKAERGGLTEADKARFIHRQLVETRQITKNVANILHQRFNNETDNHGNTMEQVRIVTLKSALVSQFRKQFQLYKVREVNDYHHAHDAYLNGVVANTLLKVYPQLEPEFVYGEYHQFDWFKANKATAKKQFYTNIMLFFAQKERIIDENGEILWDKKYLETIKKVLDYRQMNIVKKTEIQKGEFSKATIKPKGNSSKLIPRKENWDPMKYGGLDSPNMAYAVIIEHAKGKKKIVIEKKLIQINIMERKMFEKDEEAFLEEKGYRHPKVLTKLPKYTLYECEKGRRRMLASANEAQKGNQLVLSNHLVSLLYHAKNCEASDGKSLKYTEAHRETFSELLAQVSEFATRYTLADANLSKINNLFEQNKEGDIKXIAQSFVDLMVFNAMGAPASFKFFEATIDRKRYTNLKELLSSTIIYQSITGLYESRKRLDD

SEQ ID NO: 253 - protein, 1327 aa, Listeria seeligeri
MKKPYTIGLDIGTNSVGWAALTDQYDLVKRKMKVAGNSEKKQIKKNLWGVRLVDEGKTAAHRRVNRTTRRRIERRRNRISYLQEIFTAEMFEVDANFFYRLEDSFYIESEKRQSRHPFFATIEEEVAYHENYRTIYHLREKLVNSSDKADLRLVYLALAHIIKYRGNFLIEGKLDTKNTSVDEVFKQFIKTYNQVFASDIERIEENNEVAKIFSEKLTKREKLDKILNLYPNEKSTDLFAQFISLIIGSKGNFKKFFNLTEKTDIECAKDSYEEDLEVLLARVGDEYAEIFVAAKNAYNAVVLSSIITVSNTETKAKLSASMIERFDKHDKDLKRMKAFFKVRLPENFNEVFNDVEKDGYAGYIEGTKQEAFYKYMKKMLEHVEGADYFINQIEEENFLRKQRTFDNGAIPHQLHLEELEAILHQQAKYYPFLKVDYEKIKSLVTFRIPYFVGPLANGQSEFSWLTRKADGEIRPWNIEEKVDFGKSAIDFIEKMTNKDTYLPKENVLPKHSMCYQKYMVYNELTKIRYTDDQGKTHYFSGQEKQQIFNDLFKQKRKVKKKDLELFLYNMNHVESPTVEGVEDAFNSSFTTYHDLQKVGVPQEILDDPLNTEMLEEIIKILTVFEDKRMINERLQEFSNVLDEAVLKKLERRHYTGWGRLSAKLLIGIRDKESHLTILDYLMDDKHNRNLMQLINDSNLSFKSIIEKEQVSTADKDIQSIVADLAGSPAIKKGILQSLKIVDELVGIMGYPPQTIVVEMARENQTTGKGKNNSKPRFTSLEKAIKELGSQILKEHPTDNQGLKNDRLYLYYLQNGKDMYTGQELDIHNLSNYDIDHVVPQSFITDNSIDNRVLASSAANREKGDNVPSLEVVRKRKVYWEKLYQAKLMSKRKFDYLTKAERGGLTEADKARFIHRQLVETRQITKNVANILHQRFNCKKDESGNVIEQVRIVTLKAALVSQFRKQFQLYKVREVNDYHHAHDAYLNCVVANTLLKVYPQLEPEFVYGDYHQFDWFKANKATAKKQFYTNIMLFFAKKDRIIDENGEILWDKKYLDTIKKVLNYRQMNIVKKTEIQKGEFSNATANPKGNSSKLIPRKADWDPIKYGGFDGSNMAYAIVIEHEKRKKKTVIKKELIQINIMERTAFEKDQKEFLEGKGYRNPKVITKIPKYTLYECENGRRRMLGSANEAQKGNQMVLPNHLMTLLYHAKNCEASDGKSLAYIESHREMFAELLDSISEFASRYTLADANLEKINTIFEQNKSGDVKVIAQSFVNLLEFNAMGAPASFKYFETNIERKRYNNLKELLNATIIYQSITGLYEARKRLDD

SEQ ID NO: 254 - protein, 1359 aa, Artificial Sequence; identical to SEQ ID NO: 228
  Synthetic polypeptide

SEQ ID NO: 255 - protein, 1290 aa, Roseburia hominis
IVDYCIGLDLGTGSVGWAVVDMNHRLMKRNGKHLWGSRLFSNAETAATRRSSRSIRRRYNKRRERIRLLRAILQDMVLEKDPTFFIRLEHTSFLDEEDKAKYLGDNYNLFIDEDFNDYTYYHKYPTIYHLRKALCESTEKADPRLIYLALHHIVKYRGNFLYEGQKFNMDASNIEDKLSDVFTQFADFNNIPYEDDKKNLEILEILKKPLSKKAKVDEVMALISPEKEFKSAYKELVTGIAGNKMNVTKMILCESIKQGDSEIKLKFSDSNYDDQFSEVENDLGEYVEFIDSLHNIYSWVELQTIMGATHTDNASISEAMVSRYNKHHEDLQLLKKCIKDNVPKKYFDMFRNDSEKVKGYYNYINRKAPVDEFYKFVKKCIEKVDTPEAKQILHDIELENFLLKQNSRTNGSVPYQMQLDEMIKIIDNQAKYYPVLKEKREQLLSILTFRIPYYFGPLETSEHAWIKRLEGKENQRILPWNYQDTVDVDATAEGFIKRMRSYCTYFPDEEVLPKNSLIVSKYEVYNELNKIRVDDKLLEVDVKNDIYNELFMKNKTVTEKKLKNWLVNNQCCRKDAEIKGFQKENQFSTSLTPWIDFTNIFGKIDQSNFDLIEKIIYDLTVFEDKKIMKRRLKKKYALPDDKIKQILKLKYKDWSRLSKKLLDGIVADSVTVLDVLESRLNLMEIINDKELGYAQMIEEASSCPKDGKFTYEEVAKLAGSPALKRGIWQSLQIVEEITKVMKCRPKYIYIEFERSEEKERTESKIKKLENVYKDEQTSVLEELKGFDNTKKISSDSLFLYFTQLGKCMYSGKKLDIDSLDKYQIDHIVPQSLVKDDSFDNRVLVLPSENQRKLDDLVVPFDIRDKMYRFWKLLFDHELISPKKFYSLIKTEYTERDEERFINRQLVETRQITKNVTQIIEDHYSTTKVAAIRANLSHEFRVKNHIYKNRDINDYHHAHDAYIVALIGGFMRDRYPNMHDSKAVYSEYMKMFRNKNDQKGFVINSMNYPYEVDGKLIWNPDLINEIKKCFYYKDCYCTTKLDQKSGQMFNTVLPNDAHSAKGAVIPVNKNRKDVNKYGGFSGLQYVIAAIEGTKKKGKKLVKVRKLSGIPLYLKQADIKEQIEYVEKEEKLSDVKIIKNNIPLNQLIEIDGRQYLLTSECVNAMQLVLNEEQCKLIADIYNAIYKQDFDGLDNMLMIQLYLQLIDKLKTLYPIYMGIVEKFEKFVSISKEEKANVIQMLIIMHKGPQNGNIIYDDFNVGKRIGRLNGRTFYLNIEFISQSPTGIYTKKYKL

SEQ ID NO: 256 - protein, 1292 aa, Sharpea azabuensis
KDIRYSIGLDIGTNSVGWAVMDEHYELLKKGNHHMWGSRLFDAAEPAATRRASRSIRRRYNKRRERIRLLRDLLGDMVMEVDPTFFIRLLNVSFLDEEDKQKNLGDNYNLFIEKDFNDKTYYDKYPTIYHLRKELCENKEKADPRLIYLALHHIVKYRGNFLYEGQSFTMDNSDIEERLNSAIEKFMSINEFDNRIVSDINSMIAVLSKIYQRSKKADDLLKIMNPTKEEKAAYKEFTKALVGLKFNISKMILAQEVKKGDTDIVLEFSNANYDSTIDELQSELGEYIEFIEMLHNIYSWVELQAILGATHTDNPSISAAMVERYEEHKKDLRVLKKVIREELPDKYNEVFRKDNRKLHNYLGYIKYDTPVEEFYKYIKGLLAKVDTDEAREILERIDLEKFMLKQNSRTNGSIPYQMQKDEMIQIIDNQSVYYPQLKENRDKLISILEFRIPYYFGPLAHSEFAWIKKFEDKQKERILPWNYDQIVDIDATAEGFIERMKNTGTYFPDEPVMAKNSLTVSKFEVLNELNKIRINGKLIAVETKKELLSDLFMKNKTITDKKLKDWLVTHQYYDINEELKIEGYQKDLQFSTSLAPWIDFTKIFGEINASNYQLIEKIIYDISIFEDKKILKRRLKKVYQLDDLLVDKILKLNYTGWSRLSEKLLTGMTADKATVLFVLESNKNLMEIINDEKLGYKQIIEESNMQDIEGPFKYDEVKKLAGSPAIKRGIWQALLVVREITKFMKHEPSHIYIEFAREEQKVRKESKIAKLQKIYENLQTQVYESLKKEDAKKRMETDALYLYYLQMGKSMYSGKPLDIDKLSTYQIDHILPQSLIKDDSFDNRVLVLPEENQWKLDSETVPFEIRNKMIGFWQMLHENGLMSNKKFFSLIRTDFSDKDKERFINRQLVETRQIIKNVAVIINDHYTNTNIVTVRAELSHQFRERYKIYKNRDINDFHHAHDAYIACIVGQFMHQNFEHLDAKIIYGQYKKNYKKNYGFILNSMNHLQSDIDTGEVMWDPAKIGKIKSCFYYKDVYVTKKLEQNSGTLFNTVLPNDAHSEKGATVPLNKYRADVHKYGGFGNVQSIIVAIEGKKKKGKKLIDVRKLTSIPLHLKNAPVEEQLSYIASPEHEDLIDVRIVKEILKNQLIEIDGGLYYVTSEYVTARQLSLNEQSCKLISEIYAAMLKKRYEYLDEEEIFDLYLQLLQKMDTLYPAYKGIAKRFFDFKNIDVVEKCDVIQILIIMHAGPMNGNIMYDDFKFTNRIGRFTHKNIDLKTTFISTSVTGLFSKKYKL

SEQ ID NO: 257 - protein, 1359 aa, Artificial Sequence; identical to SEQ ID NO: 228
  Synthetic polypeptide

SEQ ID NO: 258 - protein, 1359 aa, Artificial Sequence
  Synthetic polypeptide
MDKKYSIGLAIGTNSVGWAVITDEYKVPSKKFKVLGNTDRHSIKKNLIGALLFDSGETAEATRLKRTARRRYTRRKNRICYLQEIFSNEMAKVDDSFFHRLEESFLVEEDKKHERHPIFGNIVDEVAYHEKYPTIYHLRKKLVDSTDKADLRLIYLALAHMIKFRGHFLIEGDLNPDNSDVDKLFIQLVQTYNQLFEENINASGVDAKAILSARLSKSRRLENLIAQLPGEKKNGLFGNLIALSLGLTPNFKSNFDLAEDAKLQLSKDTYDDDLDNLLAQIGDQYADLFLAAKNLSDAILLSDILRVNTEITKAPLSASMIKRYDEHHQDLTLLKALVRQQLPEKYKEIFFDQSKNGYAGYIDGGASQEEFYKFIKPILEKMDGTEELLVKLNREDLLRKQRTFDNGSIPHQIHLGELHAILRRQEDFYPFLKDNREKIEKILTFRIPYYVGPLARGNSRFAWMTRKSEETITPWNFEEVVDKGASAQSFIERMTNFDKNLPNEKVLPKHSLLYEYFTVYNELTKVKYVTEGMRKPAFLSGEQKKAIVDLLFKTNRKVTVKQLKEDYFKKIECFDSVEISGVEDRFNASLGTYHDLLKIIKDKDFLDNEENEDILEDIVLTLTLFEDREMIEERLKTYAHLFDDKVMKQLKRRRYTGWGRLSRKLINGIRDKQSGKTILDFLKDGFANRNFMQLIHDDSLTFKEDIQKAQVSGQGDSLHEHIANLAGSPAIKKGILQTVKVVDELVKVMGRHKPENIVIEMARENQTTQKGQKNSRERMKRIEEGIKELGSQILKEHPVENTQLQNEKLYLYYLQNGRDMYVDQELDINRLSDYDVDAIVPQSFLKDDSIDNKVLTRSDKNRGKSDNVPSEEVVKKMKNYWRQLLNAKLITQRKFDNLTKAERGGLSELDKAGFIKRQLVETRQITKHVAQILDSRMNTKYDENDKLIREVKVITLKSKLVSDFRKDFQFYKVREINNYHHAHDAYLNAVVGTALIKKYPKLESEFVYGDYKVYDVSEQEIGKATAKYFFYSNIMNFFKTEITLANGEIRKRPLIETNGETGEIVWDKGRDFATVRKVLSMPQVNIVKKTEVQTGGFSKESILPKRNSDKLIARKKDWDPKKYGGFDSPTVAYSVLVVAKVEKGKSKKLKSVKELLGITIMERSSFEKNPIDFLEAKGYKEVKKDLIIKLPKYSLFELENGRKRMLASGELQKGNELALPSKYVNFLYLASHYEKLKGSPEDNEQKQLFVEQHKHYLDEIIEQISEFSKRVILADANLDKVLSAYNKHRDKPIREQAENIIHLFTLTNLGAPAAFKYFDTTIDRKRYTSTKEVLDATLIHQSITGLYETRIDLSQLGGD

SEQ ID NO: 259 - protein, 1359 aa, Artificial Sequence; identical to SEQ ID NO: 11
  Synthetic polypeptide

SEQ ID NO: 260 - protein, 1359 aa, Artificial Sequence; identical to SEQ ID NO: 258
  Synthetic polypeptide

SEQ ID NO: 261 - protein, 1300 aa, Francisella novicida
MSIYQEFVNKYSLSKTLRFELIPQGKTLENIKARGLILDDEKRAKDYKKAKQIIDKYHQFFIEEILSSVCISEDLLQNYSDVYFKLKKSDDDNLQKDFKSAKDTIKKQISEYIKDSEKFKNLFNQNLIDAKKGQESDLILWLKQSKDNGIELFKANSDITDIDEALEIIKSFKGWTTYFKGFHENRKNVYSSNDIPTSIIYRIVDDNLPKFLENKAKYESLKDKAPEAINYEQIKKDLAEELTFDIDYKTSEVNQRVFSLDEVFEIANFNNYLNQSGITKFNTIIGGKFVNGENTKRKGINEYINLYSQQINDKTLKKYKMSVLFKQILSDTESKSFVIDKLEDDSDVVTTMQSFYEQIAAFKTVEEKSIKETLSLLFDDLKAQKLDLSKIYFKNDKSLTDLSQQVFDDYSVIGTAVLEYITQQIAPKNLDNPSKKEQELIAKKTEKAKYLSLETIKLALEEFNKHRDIDKQCRFEEILANFAAIPMIFDEIAQNKDNLAQISIKYQNQGKKDLLQASAEDDVKAIKDLLDQTNNLLHKLKIFHISQSEDKANILDKDEHFYLVFEECYFELANIVPLYNKIRNYITQKPYSDEKFKLNFENSTLANGWDKNKEPDNTAILFIKDDKYYLGVMNKKNNKIFDDKAIKENKGEGYKKIVYKLLPGANKMLPKVFFSAKSIKFYNPSEDILRIRNHSTHTKNGSPQKGYEKFEFNIEDCRKFIDFYKQSISKHPEWKDFGFRFSDTQRYNSIDEFYREVENQGYKLTFENISESYIDSVVNQGKLYLFQIYNKDFSAYSKGRPNLHTLYWKALFDERNLQDVVYKLNGEAELFYRKQSIPKKITHPAKEAIANKNKDNPKKESVFEYDLIKDKRFTEDKFFFHCPITINFKSSGANKFNDEINLLLKEKANDVHILSIARGERHLAYYTLVDGKGNIIKQDTFNIIGNDRMKTNYHDKLAAIEKDRDSARKDWKKINNIKEMKEGYLSQVVHEIAKLVIEYNAIVVFEDLNFGFKRGRFKVEKQVYQKLEKMLIEKLNYLVFKDNEFDKTGGVLRAYQLTAPFETFKKMGKQTGIIYYVPAGFTSKICPVTGFVNQLYPKYESVSKSQEFFSKFDKICYNLDKGYFEFSFDYKNFGDKAAKGKWTIASFGSRLINFRNSDKNHNWDTREVYPTKELEKLLKDYSIEYGHGECIKAAICGESDKKFFAKLTSVLNTILQMRNSKTGTELDYLISPVADVNGNFFDSRQAPKNMPQDADANGAYHIGLKGLMLLGRIKNNQEGKKLNLVIKNEEYFEFVQNRNN

SEQ ID NO: 262 - protein, 1300 aa, Francisella novicida
MSIYQEFVNKYSLSKTLRFELIPQGKTLENIKARGLILDDEKRAKDYKKAKQIIDKYHQFFIEEILSSVCISEDLLQNYSDVYFKLKKSDDDNLQKDFKSAKDTIKKQISEYIKDSEKFKNLFNQNLIDAKKGQESDLILWLKQSKDNGIELFKANSDITDIDEALEIIKSFKGWTTYFKGFHENRKNVYSSNDIPTSIIYRIVDDNLPKFLENKAKYESLKDKAPEAINYEQIKKDLAEELTFDIDYKTSEVNQRVFSLDEVFEIANFNNYLNQSGITKFNTIIGGKFVNGENTKRKGINEYINLYSQQINDKTLKKYKMSVLFKQILSDTESKSFVIDKLEDDSDVVTTMQSFYEQIAAFKTVEEKSIKETLSLLFDDLKAQKLDLSKIYFKNDKSLTDLSQQVFDDYSVIGTAVLEYITQQIAPKNLDNPSKKEQELIAKKTEKAKYLSLETIKLALEEFNKHRDIDKQCRFEEILANFAAIPMIFDEIAQNKDNLAQISIKYQNQGKKDLLQASAEDDVKAIKDLLDQTNNLLHKLKIFHISQSEDKANILDKDEHFYLVFEECYFELANIVPLYNKIRNYITQKPYSDEKFKLNFENSTLANGWDKNKEPDNTAILFIKDDKYYLGVMNKKNNKIFDDKAIKENKGEGYKKIVYKLLPGANKMLPKVFFSAKSIKFYNPSEDILRIRNHSTHTKNGSPQKGYEKFEFNIEDCRKFIDFYKQSISKHPEWKDFGFRFSDTQRYNSIDEFYREVENQGYKLTFENISESYIDSVVNQGKLYLFQIYNKDFSAYSKGRPNLHTLYWKALFDERNLQDVVYKLNGEAELFYRKQSIPKKITHPAKEAIANKNKDNPKKESVFEYDLIKDKRFTEDKFFFHCPITINFKSSGANKFNDEINLLLKEKANDVHILSIDRGERHLAYYTLVDGKGNIIKQDTFNIIGNDRMKTNYHDKLAAIEKDRDSARKDWKKINNIKEMKEGYLSQVVHEIAKLVIEYNAIVVFADLNFGFKRGRFKVEKQVYQKLEKMLIEKLNYLVFKDNEFDKTGGVLRAYQLTAPFETFKKMGKQTGIIYYVPAGFTSKICPVTGFVNQLYPKYESVSKSQEFFSKFDKICYNLDKGYFEFSFDYKNFGDKAAKGKWTIASFGSRLINFRNSDKNHNWDTREVYPTKELEKLLKDYSIEYGHGECIKAAICGESDKKFFAKLTSVLNTILQMRNSKTGTELDYLISPVADVNGNFFDSRQAPKNMPQDADANGAYHIGLKGLMLLGRIKNNQEGKKLNLVIKNEEYFEFVQNRNN

SEQ ID NO: 263 - protein, 1300 aa, Francisella novicida
MSIYQEFVNKYSLSKTLRFELIPQGKTLENIKARGLILDDEKRAKDYKKAKQIIDKYHQFFIEEILSSVCISEDLLQNYSDVYFKLKKSDDDNLQKDFKSAKDTIKKQISEYIKDSEKFKNLFNQNLIDAKKGQESDLILWLKQSKDNGIELFKANSDITDIDEALEIIKSFKGWTTYFKGFHENRKNVYSSNDIPTSIIYRIVDDNLPKFLENKAKYESLKDKAPEAINYEQIKKDLAEELTFDIDYKTSEVNQRVFSLDEVFEIANFNNYLNQSGITKFNTIIGGKFVNGENTKRKGINEYINLYSQQINDKTLKKYKMSVLFKQILSDTESKSFVIDKLEDDSDVVTTMQSFYEQIAAFKTVEEKSIKETLSLLFDDLKAQKLDLSKIYFKNDKSLTDLSQQVFDDYSVIGTAVLEYITQQIAPKNLDNPSKKEQELIAKKTEKAKYLSLETIKLALEEFNKHRDIDKQCRFEEILANFAAIPMIFDEIAQNKDNLAQISIKYQNQGKKDLLQASAEDDVKAIKDLLDQTNNLLHKLKIFHISQSEDKANILDKDEHFYLVFEECYFELANIVPLYNKIRNYITQKPYSDEKFKLNFENSTLANGWDKNKEPDNTAILFIKDDKYYLGVMNKKNNKIFDDKAIKENKGEGYKKIVYKLLPGANKMLPKVFFSAKSIKFYNPSEDILRIRNHSTHTKNGSPQKGYEKFEFNIEDCRKFIDFYKQSISKHPEWKDFGFRFSDTQRYNSIDEFYREVENQGYKLTFENISESYIDSVVNQGKLYLFQIYNKDFSAYSKGRPNLHTLYWKALFDERNLQDVVYKLNGEAELFYRKQSIPKKITHPAKEAIANKNKDNPKKESVFEYDLIKDKRFTEDKFFFHCPITINFKSSGANKFNDEINLLLKEKANDVHILSIDRGERHLAYYTLVDGKGNIIKQDTFNIIGNDRMKTNYHDKLAAIEKDRDSARKDWKKINNIKEMKEGYLSQVVHEIAKLVIEYNAIVVFEDLNFGFKRGRFKVEKQVYQKLEKMLIEKLNYLVFKDNEFDKTGGVLRAYQLTAPFETFKKMGKQTGIIYYVPAGFTSKICPVTGFVNQLYPKYESVSKSQEFFSKFDKICYNLDKGYFEFSFDYKNFGDKAAKGKWTIASFGSRLINFRNSDKNHNWDTREVYPTKELEKLLKDYSIEYGHGECIKAAICGESDKKFFAKLTSVLNTILQMRNSKTGTELDYLISPVADVNGNFFDSRQAPKNMPQDAAANGAYHIGLKGLMLLGRIKNNQEGKKLNLVIKNEEYFEFVQNRNN

SEQ ID NO: 264 - protein, 1300 aa, Francisella novicida
MSIYQEFVNKYSLSKTLRFELIPQGKTLENIKARGLILDDEKRAKDYKKAKQIIDKYHQFFIEEILSSVCISEDLLQNYSDVYFKLKKSDDDNLQKDFKSAKDTIKKQISEYIKDSEKFKNLFNQNLIDAKKGQESDLILWLKQSKDNGIELFKANSDITDIDEALEIIKSFKGWTTYFKGFHENRKNVYSSNDIPTSIIYRIVDDNLPKFLENKAKYESLKDKAPEAINYEQIKKDLAEELTFDIDYKTSEVNQRVFSLDEVFEIANFNNYLNQSGITKFNTIIGGKFVNGENTKRKGINEYINLYSQQINDKTLKKYKMSVLFKQILSDTESKSFVIDKLEDDSDVVTTMQSFYEQIAAFKTVEEKSIKETLSLLFDDLKAQKLDLSKIYFKNDKSLTDLSQQVFDDYSVIGTAVLEYITQQIAPKNLDNPSKKEQELIAKKTEKAKYLSLETIKLALEEFNKHRDIDKQCRFEEILANFAAIPMIFDEIAQNKDNLAQISIKYQNQGKKDLLQASAEDDVKAIKDLLDQTNNLLHKLKIFHISQSEDKANILDKDEHFYLVFEECYFELANIVPLYNKIRNYITQKPYSDEKFKLNFENSTLANGWDKNKEPDNTAILFIKDDKYYLGVMNKKNNKIFDDKAIKENKGEGYKKIVYKLLPGANKMLPKVFFSAKSIKFYNPSEDILRIRNHSTHTKNGSPQKGYEKFEFNIEDCRKFIDFYKQSISKHPEWKDFGFRFSDTQRYNSIDEFYREVENQGYKLTFENISESYIDSVVNQGKLYLFQIYNKDFSAYSKGRPNLHTLYWKALFDERNLQDVVYKLNGEAELFYRKQSIPKKITHPAKEAIANKNKDNPKKESVFEYDLIKDKRFTEDKFFFHCPITINFKSSGANKFNDEINLLLKEKANDVHILSIARGERHLAYYTLVDGKGNIIKQDTFNIIGNDRMKTNYHDKLAAIEKDRDSARKDWKKINNIKEMKEGYLSQVVHEIAKLVIEYNAIVVFADLNFGFKRGRFKVEKQVYQKLEKMLIEKLNYLVFKDNEFDKTGGVLRAYQLTAPFETFKKMGKQTGIIYYVPAGFTSKICPVTGFVNQLYPKYESVSKSQEFFSKFDKICYNLDKGYFEFSFDYKNFGDKAAKGKWTIASFGSRLINFRNSDKNHNWDTREVYPTKELEKLLKDYSIEYGHGECIKAAICGESDKKFFAKLTSVLNTILQMRNSKTGTELDYLISPVADVNGNFFDSRQAPKNMPQDADANGAYHIGLKGLMLLGRIKNNQEGKKLNLVIKNEEYFEFVQNRNN

SEQ ID NO: 265 - protein, 1300 aa, Francisella novicida
MSIYQEFVNKYSLSKTLRFELIPQGKTLENIKARGLILDDEKRAKDYKKAKQIIDKYHQFFIEEILSSVCISEDLLQNYSDVYFKLKKSDDDNLQKDFKSAKDTIKKQISEYIKDSEKFKNLFNQNLIDAKKGQESDLILWLKQSKDNGIELFKANSDITDIDEALEIIKSFKGWTTYFKGFHENRKNVYSSNDIPTSIIYRIVDDNLPKFLENKAKYESLKDKAPEAINYEQIKKDLAEELTFDIDYKTSEVNQRVFSLDEVFEIANFNNYLNQSGITKFNTIIGGKFVNGENTKRKGINEYINLYSQQINDKTLKKYKMSVLFKQILSDTESKSFVIDKLEDDSDVVTTMQSFYEQIAAFKTVEEKSIKETLSLLFDDLKAQKLDLSKIYFKNDKSLTDLSQQVFDDYSVIGTAVLEYITQQIAPKNLDNPSKKEQELIAKKTEKAKYLSLETIKLALEEFNKHRDIDKQCRFEEILANFAAIPMIFDEIAQNKDNLAQISIKYQNQGKKDLLQASAEDDVKAIKDLLDQTNNLLHKLKIFHISQSEDKANILDKDEHFYLVFEECYFELANIVPLYNKIRNYITQKPYSDEKFKLNFENSTLANGWDKNKEPDNTAILFIKDDKYYLGVMNKKNNKIFDDKAIKENKGEGYKKIVYKLLPGANKMLPKVFFSAKSIKFYNPSEDILRIRNHSTHTKNGSPQKGYEKFEFNIEDCRKFIDFYKQSISKHPEWKDFGFRFSDTQRYNSIDEFYREVENQGYKLTFENISESYIDSVVNQGKLYLFQIYNKDFSAYSKGRPNLHTLYWKALFDERNLQDVVYKLNGEAELFYRKQSIPKKITHPAKEAIANKNKDNPKKESVFEYDLIKDKRFTEDKFFFHCPITINFKSSGANKFNDEINLLLKEKANDVHILSIARGERHLAYYTLVDGKGNIIKQDTFNIIGNDRMKTNYHDKLAAIEKDRDSARKDWKKINNIKEMKEGYLSQVVHEIAKLVIEYNAIVVFEDLNFGFKRGRFKVEKQVYQKLEKMLIEKLNYLVFKDNEFDKTGGVLRAYQLTAPFETFKKMGKQTGIIYYVPAGFTSKICPVTGFVNQLYPKYESVSKSQEFFSKFDKICYNLDKGYFEFSFDYKNFGDKAAKGKWTIASFGSRLINFRNSDKNHNWDTREVYPTKELEKLLKDYSIEYGHGECIKAAICGESDKKFFAKLTSVLNTILQMRNSKTGTELDYLISPVADVNGNFFDSRQAPKNMPQDAAANGAYHIGLKGLMLLGRIKNNQEGKKLNLVIKNEEYFEFVQNRNN

SEQ ID NO: 266 - protein, 1300 aa, Francisella novicida
MSIYQEFVNKYSLSKTLRFELIPQGKTLENIKARGLILDDEKRAKDYKKAKQIIDKYHQFFIEEILSSVCISEDLLQNYSDVYFKLKKSDDDNLQKDFKSAKDTIKKQISEYIKDSEKFKNLFNQNLIDAKKGQESDLILWLKQSKDNGIELFKANSDITDIDEALEIIKSFKGWTTYFKGFHENRKNVYSSNDIPTSIIYRIVDDNLPKFLENKAKYESLKDKAPEAINYEQIKKDLAEELTFDIDYKTSEVNQRVFSLDEVFEIANFNNYLNQSGITKFNTIIGGKFVNGENTKRKGINEYINLYSQQINDKTLKKYKMSVLFKQILSDTESKSFVIDKLEDDSDVVTTMQSFYEQIAAFKTVEEKSIKETLSLLFDDLKAQKLDLSKIYFKNDKSLTDLSQQVFDDYSVIGTAVLEYITQQIAPKNLDNPSKKEQELIAKKTEKAKYLSLETIKLALEEFNKHRDIDKQCRFEEILANFAAIPMIFDEIAQNKDNLAQISIKYQNQGKKDLLQASAEDDVKAIKDLLDQTNNLLHKLKIFHISQSEDKANILDKDEHFYLVFEECYFELANIVPLYNKIRNYITQKPYSDEKFKLNFENSTLANGWDKNKEPDNTAILFIKDDKYYLGVMNKKNNKIFDDKAIKENKGEGYKKIVYKLLPGANKMLPKVFFSAKSIKFYNPSEDILRIRNHSTHTKNGSPQKGYEKFEFNIEDCRKFIDFYKQSISKHPEWKDFGFRFSDTQRYNSIDEFYREVENQGYKLTFENISESYIDSVVNQGKLYLFQIYNKDFSAYSKGRPNLHTLYWKALFDERNLQDVVYKLNGEAELFYRKQSIPKKITHPAKEAIANKNKDNPKKESVFEYDLIKDKRFTEDKFFFHCPITINFKSSGANKFNDEINLLLKEKANDVHILSIDRGERHLAYYTLVDGKGNIIKQDTFNIIGNDRMKTNYHDKLAAIEKDRDSARKDWKKINNIKEMKEGYLSQVVHEIAKLVIEYNAIVVFADLNFGFKRGRFKVEKQVYQKLEKMLIEKLNYLVFKDNEFDKTGGVLRAYQLTAPFETFKKMGKQTGIIYYVPAGFTSKICPVTGFVNQLYPKYESVSKSQEFFSKFDKICYNLDKGYFEFSFDYKNFGDKAAKGKWTIASFGSRLINFRNSDKNHNWDTREVYPTKELEKLLKDYSIEYGHGECIKAAICGESDKKFFAKLTSVLNTILQMRNSKTGTELDYLISPVADVNGNFFDSRQAPKNMPQDAAANGAYHIGLKGLMLLGRIKNNQEGKKLNLVIKNEEYFEFVQNRNN

SEQ ID NO: 267 - protein, 1300 aa, Francisella novicida
MSIYQEFVNKYSLSKTLRFELIPQGKTLENIKARGLILDDEKRAKDYKKAKQIIDKYHQFFIEEILSSVCISEDLLQNYSDVYFKLKKSDDDNLQKDFKSAKDTIKKQISEYIKDSEKFKNLFNQNLIDAKKGQESDLILWLKQSKDNGIELFKANSDITDIDEALEIIKSFKGWTTYFKGFHENRKNVYSSNDIPTSIIYRIVDDNLPKFLENKAKYESLKDKAPEAINYEQIKKDLAEELTFDIDYKTSEVNQRVFSLDEVFEIANFNNYLNQSGITKFNTIIGGKFVNGENTKRKGINEYINLYSQQINDKTLKKYKMSVLFKQILSDTESKSFVIDKLEDDSDVVTTMQSFYEQIAAFKTVEEKSIKETLSLLFDDLKAQKLDLSKIYFKNDKSLTDLSQQVFDDYSVIGTAVLEYITQQIAPKNLDNPSKKEQELIAKKTEKAKYLSLETIKLALEEFNKHRDIDKQCRFEEILANFAAIPMIFDEIAQNKDNLAQISIKYQNQGKKDLLQASAEDDVKAIKDLLDQTNNLLHKLKIFHISQSEDKANILDKDEHFYLVFEECYFELANIVPLYNKIRNYITQKPYSDEKFKLNFENSTLANGWDKNKEPDNTAILFIKDDKYYLGVMNKKNNKIFDDKAIKENKGEGYKKIVYKLLPGANKMLPKVFFSAKSIKFYNPSEDILRIRNHSTHTKNGSPQKGYEKFEFNIEDCRKFIDFYKQSISKHPEWKDFGFRFSDTQRYNSIDEFYREVENQGYKLTFENISESYIDSVVNQGKLYLFQIYNKDFSAYSKGRPNLHTLYWKALFDERNLQDVVYKLNGEAELFYRKQSIPKKITHPAKEAIANKNKDNPKKESVFEYDLIKDKRFTEDKFFFHCPITINFKSSGANKFNDEINLLLKEKANDVHILSIARGERHLAYYTLVDGKGNIIKQDTFNIIGNDRMKTNYHDKLAAIEKDRDSARKDWKKINNIKEMKEGYLSQVVHEIAKLVIEYNAIVVFADLNFGFKRGRFKVEKQVYQKLEKMLIEKLNYLVFKDNEFDKTGGVLRAYQLTAPFETFKKMGKQTGIIYYVPAGFTSKICPVTGFVNQLYPKYESVSKSQEFFSKFDKICYNLDKGYFEFSFDYKNFGDKAAKGKWTIASFGSRLINFRNSDKNHNWDTREVYPTKELEKLLKDYSIEYGHGECIKAAICGESDKKFFAKLTSVLNTILQMRNSKTGTELDYLISPVADVNGNFFDSRQAPKNMPQDAAANGAYHIGLKGLMLLGRIKNNQEGKKLNLVIKNEEYFEFVQNRNN

SEQ ID NO: 268 - protein, 1053 aa, Streptococcus aureus
MKRNYILGLAIGITSVGYGIIDYETRDVIDAGVRLFKEANVENNEGRRSKRGARRLKRRRRHRIQRVKKLLFDYNLLTDHSELSGINPYEARVKGLSQKLSEEEFSAALLHLAKRRGVHNVNEVEEDTGNELSTKEQISRNSKALEEKYVAELQLERLKKDGEVRGSINRFKTSDYVKEAKQLLKVQKAYHQLDQSFIDTYIDLLETRRTYYEGPGEGSPFGWKDIKEWYEMLMGHCTYFPEELRSVKYAYNADLYNALNDLNNLVITRDENEKLEYYEKFQIIENVFKQKKKPTLKQIAKEILVNEEDIKGYRVTSTGKPEFTNLKVYHDIKDITARKEIIENAELLDQIAKILTIYQSSEDIQEELTNLNSELTQEEIEQISNLKGYTGTHNLSLKAINLILDELWHTNDNQIAIFNRLKLVPKKVDLSQQKEIPTTLVDDFILSPVVKRSFIQSIKVINAIIKKYGLPNDIIIELAREKNSKDAQKMINEMQKRNRQTNERIEEIIRTTGKENAKYLIEKIKLHDMQEGKCLYSLEAIPLEDLLNNPFNYEVDHIIPRSVSFDNSFNNKVLVKQEENSKKGNRTPFQYLSSSDSKISYETFKKHILNLAKGKGRISKTKKEYLLEERDINRFSVQKDFINRNLVDTRYATRGLMNLLRSYFRVNNLDVKVKSINGGFTSFLRRKWKFKKERNKGYKHHAEDALIIANADFIFKEWKKLDKAKKVMENQMFEEKQAESMPEIETEQEYKEIFITPHQIKHIKDFKDYKYSHRVDKKPNRKLINDTLYSTRKDDKGNTLIVNNLNGLYDKDNDKLKKLINKSPEKLLMYHHDPQTYQKLKLIMEQYGDEKNPLYKYYEETGNYLTKYSKKDNGPVIKKIKYYGNKLNAHLDITDDYPNSRNKVVKLSLKPYRFDVYLDNGVYKFVTVKNLDVIKKENYYEVNSKCYEEAKKLKKISNQAEFIASFYKNDLIKINGELYRVIGVNNDLLNRIEVNMIDITYREYLENMNDKRPPHIIKTIASKTQSIKKYSTDILGNLYEVKSKKHPQIIKKG

SEQ ID NO: 269 - protein, 1121 aa, Streptococcus thermophilus
MSDLVLGLAIGIGSVGVGILNKVTGEIIHKNSRIFPAAQAENNLVRRTNRQGRRLTRRKKHRRVRLNRLFEESGLITDFTKISINLNPYQLRVKGLTDELSNEELFIALKNMVKHRGISYLDDASDDGNSSIGDYAQIVKENSKQLETKTPGQIQLERYQTYGQLRGDFTVEKDGKKHRLINVFPTSAYRSEALRILQTQQEFNPQITDEFINRYLEILTGKRKYYHGPGNEKSRTDYGRYRTSGETLDNIFGILIGKCTFYPDEFRAAKASYTAQEFNLLNDLNNLTVPTETKKLSKEQKNQIINYVKNEKAMGPAKLFKYIAKLLSCDVADIKGYRIDKSGKAEIHTFEAYRKMKTLETLDIEQMDRETLDKLAYVLTLNTEREGIQEALEHEFADGSFSQKQVDELVQFRKANSSIFGKGWHNFSVKLMMELIPELYETSEEQMTILTRLGKQKTTSSSNKTKYIDEKLLTEEIYNPVVAKSVRQAIKIVNAAIKEYGDFDNIVIEMARETNEDDEKKAIQKIQKANKDEKDAAMLKAANQYNGKAELPHSVFHGHKQLATKIRLWHQQGERCLYTGKTISIHDLINNSNQFEVDHILPLSITFDDSLANKVLVYATANQEKGQRTPYQALDSMDDAWSFRELKAFVRESKTLSNKKKEYLLTEEDISKFDVRKKFIERNLVDTRYASRVVLNALQEHFRAHKIDTKVSVVRGQFTSQLRRHWGIEKTRDTYHHHAVDALIIAASSQLNLWKKQKNTLVSYSEDQLLDIETGELISDDEYKESVFKAPYQHFVDTLKSKEFEDSILFSYQVDSKFNRKISDATIYATRQAKVGKDKADETYVLGKIKDIYTQDGYDAFMKIYKKDKSKFLMYRHDPQTFEKVIEPILENYPNKQINEKGKEVPCNPFLKYKEEHGYIRKYSKKGNGPEIKSLKYYDSKLGNHIDITPKDSNNKVVLQSVSPWRADVYFNKTTGKYEILGLKYADLQFEKGTGTYKISQEKYNDIKKKEGVDSDSEFKFTLYKNDLLLVKDTETKEQQLFRFLSRTMPKQKHYVELKPYDKQKFEGGEALIKVLGNVANSGQCKKGLGKSNISIYKVRTDVLGNQHIIKNEGDKPKLDF

SEQ ID NO: 270 - protein, 887 aa, Natronobacterium gregoryi
MTVIDLDSTTTADELTSGHTYDISVTLTGVYDNTDEQHPRMSLAFEQDNGERRYITLWKNTTPKDVFTYDYATGSTYIFTNIDYEVKDGYENLTATYQTTVENATAQEVGTTDEDETFAGGEPLDHHLDDALNETPDDAETESDSGHVMTSFASRDQLPEWTLHTYTLTATDGAKTDTEYARRTLAYTVRQELYTDHDAAPVATDGLMLLTPEPLGETPLDLDCGVRVEADETRTLDYTTAKDRLLARELVEEGLKRSLWDDYLVRGIDEVLSKEPVLTCDEFDLHERYDLSVEVGHSGRAYLHINFRHRFVPKLTLADIDDDNIYPGLRVKTTYRPRRGHIVWGLRDECATDSLNTLGNQSVVAYHRNNQTPINTDLLDAIEAADRRVVETRRQGHGDDAVSFPQELLAVEPNTHQIKQFASDGFHQQARSKTRLSASRCSEKAQAFAERLDPVRLNGSTVEFSSEFFTGNNEQQLRLLYENGESVLTFRDGARGAHPDETFSKGIVNPPESFEVAVVLPEQQADTCKAQWDTMADLLNQAGAPPTRSETVQYDAFSSPESISLNVAGAIDPSEVDAAFVVLPPDQEGFADLASPTETYDELKKALANMGIYSQMAYFDRFRDAKIFYTRNVALGLLAAAGGVAFTTEHAMPGDADMFIGIDVSRSYPEDGASGQINIAATATAVYKDGTILGHSSTRPQLGEKLQSTDVRDIMKNAILGYQQVTGESPTHIVIHRDGFMNEDLDPATEFLNEQGVEYDIVEIRKQPQTRLLAVSDVQYDTPVKSIAAINQNEPRATVATFGAPEYLATRDGGGLPRPIQIERVAGETDIETLTRQVYLLSQSHIQVHNSTARLPITTAYADQASTHATKGYLVQTGAFESNVGFL

SEQ ID NO: 271 - protein, 198 aa, Mus musculus
MDSLLMKQKKFLYHFKNVRWAKGRHETYLCYVVKRRDSATSCSLDFGHLRNKSGCHVELLFLRYISDWDLDPGRCYRVTWFTSWSPCYDCARHVAEFLRWNPNLSLRIFTARLYFCEDRKAEPEGLRRLHRAGVQIGIMTFKDYFYCWNTFVENRERTFKAWEGLHENSVRLTRQLRRILLPLYEVDDLRDAFRMLGF

SEQ ID NO: 272 - protein, 198 aa, Canis familiaris
MDSLLMKQRKFLYHFKNVRWAKGRHETYLCYVVKRRDSATSFSLDFGHLRNKSGCHVELLFLRYISDWDLDPGRCYRVTWFTSWSPCYDCARHVADFLRGYPNLSLRIFAARLYFCEDRKAEPEGLRRLHRAGVQIAIMTFKDYFYCWNTFVENREKTFKAWEGLHENSVRLSRQLRRILLPLYEVDDLRDAFRTLGL

SEQ ID NO: 273 - protein, 199 aa, Bovinae
MDSLLKKQRQFLYQFKNVRWAKGRHETYLCYVVKRRDSPTSFSLDFGHLRNKAGCHVELLFLRYISDWDLDPGRCYRVTWFTSWSPCYDCARHVADFLRGYPNLSLRIFTARLYFCDKERKAEPEGLRRLHRAGVQIAIMTFKDYFYCWNTFVENHERTFKAWEGLHENSVRLSRQLRRILLPLYEVDDLRDAFRTLGL

SEQ ID NO: 274 - protein, 429 aa, Mus musculus
MGPFCLGCSHRKCYSPIRNLISQETFKFHFKNLGYAKGRKDTFLCYEVTRKDCDSPVSLHHGVFKNKDNIHAEICFLYWFHDKVLKVLSPREEFKITWYMSWSPCFECAEQIVRFLATHHNLSLDIFSSRLYNVQDPETQQNLCRLVQEGAQVAAMDLYEFKKCWKKFVDNGGRRFRPWKRLLTNFRYQDSKLQEILRPCYIPVPSSSSSTLSNICLTKGLPETRFCVEGRRMDPLSEEEFYSQFYNQRVKHLCYYHRMKPYLCYQLEQFNGQAPLKGCLLSEKGKQHAEILFLDKIRSMELSQVTITCYLTWSPCPNCAWQLAAFKRDRPDLILHIYTSRLYFHWKRPFQKGLCSLWQSGILVDVMDLPQFTDCWTNFVNPKRPFWPWKGLEIISRRTQRRLRRIKESWGLQDLVNDFGNLQLGPPMS

SEQ ID NO: 275 - protein, 429 aa, Rattus rattus
MGPFCLGCSHRKCYSPIRNLISQETFKFHFKNLRYAIDRKDTFLCYEVTRKDCDSPVSLHHGVFKNKDNIHAEICFLYWFHDKVLKVLSPREEFKITWYMSWSPCFECAEQVLRFLATHHNLSLDIFSSRLYNIRDPENQQNLCRLVQEGAQVAAMDLYEFKKCWKKFVDNGGRRFRPWKKLLTNFRYQDSKLQEILRPCYIPVPSSSSSTLSNICLTKGLPETRFCVERRRVHLLSEEEFYSQFYNQRVKHLCYYHGVKPYLCYQLEQFNGQAPLKGCLLSEKGKQHAEILFLDKIRSMELSQVIITCYLTWSPCPNCAWQLAAFKRDRPDLILHIYTSRLYFHWKRPFQKGLCSLWQSGILVDVMDLPQFTDCWTNFVNPKRPFWPWKGLEIISRRTQRRLHRIKESWGLQDLVNDFGNLQLGPPMS

SEQ ID NO: 276 - protein, 370 aa, Rhesus macaque
MVEPMDPRTFVSNFNNRPILSGLNTVWLCCEVKTKDPSGPPLDAKIFQGKVYSKAKYHPEMRFLRWFHKWRQLHHDQEYKVTWYVSWSPCTRCANSVATFLAKDPKVTLTIFVARLYYFWKPDYQQALRILCQKRGGPHATMKIMNYNEFQDCWNKFVDGRGKPFKPRNNLPKHYTLLQATLGELLRHLMDPGTFTSNFNNKPWVSGQHETYLCYKVERLHNDTWVPLNQHRGFLRNQAPNIHGFPKGRHAELCFLDLIPFWKLDGQQYRVTCFTSWSPCFSCAQEMAKFISNNEHVSLCIFAARIYDDQGRYQEGLRALHRDGAKIAMMNYSEFEYCWDTFVDRQGRPFQPWDGLDEHSQALSGRLRAI

SEQ ID NO: 277 - protein, 384 aa, Pan troglodytes
MKPHFRNPVERMYQDTFSDNFYNRPILSHRNTVWLCYEVKTKGPSRPPLDAKIFRGQVYSKLKYHPEMRFFHWFSKWRKLHRDQEYEVTWYISWSPCTKCTRDVATFLAEDPKVTLTIFVARLYYFWDPDYQEALRSLCQKRDGPRATMKIMNYDEFQHCWSKFVYSQRELFEPWNNLPKYYILLHIMLGEILRHSMDPPTFTSNFNNELWVRGRHETYLCYEVERLHNDTWVLLNQRRGFLCNQAPHKHGFLEGRHAELCFLDVIPFWKLDLHQDYRVTCFTSWSPCFSCAQEMAKFISNNKHVSLCIFAARIYDDQGRCQEGLRTLAKAGAKISIMTYSEFKHCWDTFVDHQGCPFQPWDGLEEHSQALSGRLRAILQNQGN

SEQ ID NO: 278 - protein, 377 aa, Chlorocebus aethiops
MNPQIRNMVEQMEPDIFVYYFNNRPILSGRNTVWLCYEVKTKDPSGPPLDANIFQGKLYPEAKDHPEMKFLHWFRKWRQLHRDQEYEVTWYVSWSPCTRCANSVATFLAEDPKVTLTIFVARLYYFWKPDYQQALRILCQERGGPHATMKIMNYNEFQHCWNEFVDGQGKPFKPRKNLPKHYTLLHATLGELLRHVMDPGTFTSNFNNKPWVSGQRETYLCYKVERSHNDTWVLLNQHRGFLRNQAPDRHGFPKGRHAELCFLDLIPFWKLDDQQYRVTCFTSWSPCFSCAQKMAKFISNNKHVSLCIFAARIYDDQGRCQEGLRTLHRDGAKIAVMNYSEFEYCWDTFVDRQGRPFQPWDGLDEHSQALSGRLRAI

SEQ ID NO: 279 - protein, 384 aa, homo sapiens
MKPHFRNTVERMYRDTFSYNFYNRPILSRRNTVWLCYEVKTKGPSRPPLDAKIFRGQVYSELKYHPEMRFFHWFSKWRKLHRDQEYEVTWYISWSPCTKCTRDMATFLAEDPKVTLTIFVARLYYFWDPDYQEALRSLCQKRDGPRATMKIMNYDEFQHCWSKFVYSQRELFEPWNNLPKYYILLHIMLGEILRHSMDPPTFTFNFNNEPWVRGRHETYLCYEVERMHNDTWVLLNQRRGFLCNQAPHKHGFLEGRHAELCFLDVIPFWKLDLDQDYRVTCFTSWSPCFSCAQEMAKFISKNKHVSLCIFTARIYDDQGRCQEGLRTLAEAGAKISIMTYSEFKHCWDTFVDHQGCPFQPWDGLDEHSQDLSGRLRAILQNQEN

SEQ ID NO: 280 - protein, 373 aa, homo sapiens
MKPHFRNTVERMYRDTFSYNFYNRPILSRRNTVWLCYEVKTKGPSRPRLDAKIFRGQVYSQPEHHAEMCFLSWFCGNQLPAYKCFQITWFVSWTPCPDCVAKLAEFLAEHPNVTLTISAARLYYYWERDYRRALCRLSQAGARVKIMDDEEFAYCWENFVYSEGQPFMPWYKFDDNYAFLHRTLKEILRNPMEAMYPHIFYFHFKNLRKAYGRNESWLCFTMEVVKHHSPVSWKRGVFRNQVDPETHCHAERCFLSWFCDDILSPNTNYEVTWYTSWSPCPECAGEVAEFLARHSNVNLTIFTARLYYFWDTDYQEGLRSLSQEGASVEIMGYKDFKYCWENFVYNDDEPFKPWKGLKYNFLFLDSKLQEILE

SEQ ID NO: 281 - protein, 382 aa, homo sapiens
MNPQIRNPMERMYRDTFYDNFENEPILYGRSYTWLCYEVKIKRGRSNLLWDTGVFRGQVYFKPQYHAEMCFLSWFCGNQLPAYKCFQITWFVSWTPCPDCVAKLAEFLSEHPNVTLTISAARLYYYWERDYRRALCRLSQAGARVTIMDYEEFAYCWENFVYNEGQQFMPWYKFDENYAFLHRTLKEILRYLMDPDTFTFNFNNDPLVLRRRQTYLCYEVERLDNGTWVLMDQHMGFLCNEAKNLLCGFYGRHAELRFLDLVPSLQLDPAQIYRVTWFISWSPCFSWGCAGEVRAFLQENTHVRLRIFAARIYDYDPLYKEALQMLRDAGAQVSIMTYDEFEYCWDTFVYRQGCPFQPWDGLEEHSQALSGRLRAILQNQGN

SEQ ID NO: 282 - protein, 190 aa, homo sapiens
MNPQIRNPMKAMYPGTFYFQFKNLWEANDRNETWLCFTVEGIKRRSVVSWKTGVFRNQVDSETHCHAERCFLSWFCDDILSPNTKYQVTWYTSWSPCPDCAGEVAEFLARHSNVNLTIFTARLYYFQYPCYQEGLRSLSQEGVAVEIMDYEDFKYCWENFVYNDNEPFKPWKGLKTNFRLLKRRLRESLQ

SEQ ID NO: 283 - protein, 199 aa, homo sapiens
MEASPASGPRHLMDPHIFTSNFNNGIGRHKTYLCYEVERLDNGTSVKMDQHRGFLHNQAKNLLCGFYGRHAELRFLDLVPSLQLDPAQIYRVTWFISWSPCFSWGCAGEVRAFLQENTHVRLRIFAARIYDYDPLYKEALQMLRDAGAQVSIMTYDEFKHCWDTFVDHQGCPFQPWDGLDEHSQALSGRLRAILQNQGN

SEQ ID NO: 284 - protein, 200 aa, homo sapiens
MALLTAETFRLQFNNKRRLRRPYYPRKALLCYQLTPQNGSTPTRGYFENKKKCHAEICFINEIKSMGLDETQCYQVTCYLTWSPCSSCAWELVDFIKAHDHLNLGIFASRLYYHWCKPQQKGLRLLCGSQVPVEVMGFPKFADCWENFVDHEKPLSFNPYKMLEELDKNSRAIKRRLERIKIPGVRAQGRYMDILCDAEV

SEQ ID NO: 285 - protein, 386 aa, homo sapiens
MNPQIRNPMERMYRDTFYDNFENEPILYGRSYTWLCYEVKIKRGRSNLLWDTGVFRGPVLPKRQSNHRQEVYFRFENHAEMCFLSWFCGNRLPANRRFQITWFVSWNPCLPCVVKVTKFLAEHPNVTLTISAARLYYYRDRDWRWVLLRLHKAGARVKIMDYEDFAYCWENFVCNEGQPFMPWYKFDDNYASLHRTLKEILRNPMEAMYPHIFYFHFKNLLKACGRNESWLCFTMEVTKHHSAVFRKRGVFRNQVDPETHCHAERCFLSWFCDDILSPNTNYEVTWYTSWSPCPECAGEVAEFLARHSNVNLTIFTARLCYFWDTDYQEGLCSLSQEGASVKIMGYKDFVSCWKNFVYSDDEPFKPWKGLQTNFRLLKRRLREILQ

SEQ ID NO: 286 - protein, 236 aa, homo sapiens
MTSEKGPSTGDPTLRRRIEPWEFDVFYDPRELRKEACLLYEIKWGMSRKIWRSSGKNTTNHVEVNFIKKFTSERDFHPSMSCSITWFLSWSPCWECSQAIREFLSRHPGVTLVIYVARLFWHMDQQNRQGLRDLVNSGVTIQIMRASEYYHCWRNFVNYPPGDEAHWPQYPPLWMMLYALELHCIILSLPPCLKISRRWQNHLTFFRLHLQNCHYQTIPPHILLATGLIHPSVAWR

SEQ ID NO: 287 - protein, 229 aa, homo sapiens
MSSETGPVAVDPTLRRRIEPHEFEVFFDPRELRKETCLLYEINWGGRHSVWRHTSQNTSNHVEVNFLEKFTTERYFRPNTRCSITWFLSWSPCGECSRAITEFLSRHPYVTLFIYIARLYHHTDQRNRQGLRDLISSGVTIQIMTEQEYCYCWRNFVNYPPSNEAYWPRYPHLWVKLYVLELYCIILGLPPCLKILRRKQPQLTFFTITLQTCHYQRIPPHLLWATGLK

SEQ ID NO: 288 - protein, 229 aa, Rattus rattus [sequence omitted]

SEQ ID NO: 289 - protein, 208 aa, Petromyzon marinus
MTDAEYVRIHEKLDIYTFKKQFFNNKKSVSHRCYVLFELKRRGERRACFWGYAVNKPQSGTERGIHAEIFSIRKVEEYLRDNPGQFTINWYSSWSPCADCAEKILEWYNQELRGNGHTLKIWACKLYYEKNARNQIGLWNLRDNGVGLNVMVSEHYQCCRKIFIQSSHNQLNENRWLEKTLKRAEKRRSELSIMIQVKILHTTKSPAV

SEQ ID NO: 290 - protein, 384 aa, homo sapiens
MKPHFRNTVERMYRDTFSYNFYNRPILSRRNTVWLCYEVKTKGPSRPPLDAKIFRGQVYSELKYHPEMRFFHWFSKWRKLHRDQEYEVTWYISWSPCTKCTRDMATFLAEDPKVTLTIFVARLYYFWDPDYQEALRSLCQKRDGPRATMKIMNYDEFQHCWSKFVYSQRELFEPWNNLPKYYILLHIMLGEILRHSMDPPTFTFNFNNEPWVRGRHETYLCYEVERMHNDTWVLLNQRRGFLCNQAPHKHGFLEGRHAELCFLDVIPFWKLDLDQDYRVTCFTSWSPCFSCAQEMAKFISKNKHVSLCIFTARIYRRQGRCQEGLRTLAEAGAKISIMTYSEFKHCWDTFVDHQGCPFQPWDGLDEHSQDLSGRLRAILQNQEN

SEQ ID NO: 291 - protein, 184 aa, homo sapiens
MDPPTFTFNFNNEPWVRGRHETYLCYEVERMHNDTWVLLNQRRGFLCNQAPHKHGFLEGRHAELCFLDVIPFWKLDLDQDYRVTCFTSWSPCFSCAQEMAKFISKNKHVSLCIFTARIYDDQGRCQEGLRTLAEAGAKISIMTYSEFKHCWDTFVDHQGCPFQPWDGLDEHSQDLSGRLRAILQ

SEQ ID NO: 292 - protein, 184 aa, homo sapiens
MDPPTFTFNFNNEPWVRGRHETYLCYEVERMHNDTWVLLNQRRGFLCNQAPHKHGFLEGRHAELCFLDVIPFWKLDLDQDYRVTCFTSWSPCFSCAQEMAKFISKNKHVSLCIFTARIYRRQGRCQEGLRTLAEAGAKISIMTYSEFKHCWDTFVDHQGCPFQPWDGLDEHSQDLSGRLRAILQ

SEQ ID NO: 293 - protein, 1633 aa, Artificial Sequence
  Synthetic polypeptide
MGSSHHHHHHMSSETGPVAVDPTLRRRIEPHEFEVFFDPRELRKETCLLYEINWGGRHSIWRHTSQNTNKHVEVNFIEKFTTERYFCPNTRCSITWFLSWSPCGECSRAITEFLSRYPHVTLFIYIARLYHHADPRNRQGLRDLISSGVTIQIMTEQESGYCWRNFVNYSPSNEAHWPRYPHLWVRLYVLELYCIILGLPPCLNILRRKQPQLTFFTIALQSCHYQRLPPHILWATGLKSGSETPGTSESATPESDKKYSIGLAIGTNSVGWAVITDEYKVPSKKFKVLGNTDRHSIKKNLIGALLFDSGETAEATRLKRTARRRYTRRKNRICYLQEIFSNEMAKVDDSFFHRLEESFLVEEDKKHERHPIFGNIVDEVAYHEKYPTIYHLRKKLVDSTDKADLRLIYLALAHMIKFRGHFLIEGDLNPDNSDVDKLFIQLVQTYNQLFEENPINASGVDAKAILSARLSKSRRLENLIAQLPGEKKNGLFGNLIALSLGLTPNFKSNFDLAEDAKLQLSKDTYDDDLDNLLAQIGDQYADLFLAAKNLSDAILLSDILRVNTEITKAPLSASMIKRYDEHHQDLTLLKALVRQQLPEKYKEIFFDQSKNGYAGYIDGGASQEEFYKFIKPILEKMDGTEELLVKLNREDLLRKQRTFDNGSIPHQIHLGELHAILRRQEDFYPFLKDNREKIEKILTFRIPYYVGPLARGNSRFAWMTRKSEETITPWNFEEVVDKGASAQSFIERMTNFDKNLPNEKVLPKHSLLYEYFTVYNELTKVKYVTEGMRKPAFLSGEQKKAIVDLLFKTNRKVTVKQLKEDYFKKIECFDSVEISGVEDRFNASLGTYHDLLKLLKDKDFLDNEENEDILEDIVLTLTLFEDREMIEERLKTYAHLFDDKVMKQLKRRRYTGWGRLSRKLINGIRDKQSGKTILDFLKSDGFANRNFMQLIHDDSLTFKEDIQKAQVSGQGDSLHEHIANLAGSPAIKKGILQTVKVVDELVKVMGRHKPENIVIEMARENQTTQKGQKNSRERMKRIEEGIKELGSQILKEHPVENTQLQNEKLYLYYLQNGRDMYVDQELDINRLSDYDVDAIVPQSFLKDDSIDNKVLTRSDKNRGKSDNVPSEEVVKKMKNYWRQLLNAKLITQRKFDNLTKAERGGLSELDKAGFIKRQLVETRQITKHVAQILDSRMNTKYDENDKLIREVKVITLKSKLVSDFRKDFQFYKVREINNYHHAHDAYLNAVVGTALIKKYPKLESEFVYGDYKVYDVRKMIAKSEQEIGKATAKYFFYSNIMNFFKTEITLANGEIRKRPLIETNGETGEIVWDKGRDFATVRKVLSMPQVNIVKKTEVQTGGFSKESILPKRNSDKLIARKKDWDPKKYGGFDSPTVAYSVLVVAKVEKGKSKKLKSVKELLGITIMERSSFEKNPIDFLEAKGYKEVKKDLLLKLPKYSLFELENGRKRMLASAGELQKGNELALPSKYVNFLYLASHYEKLKGSPEDNEQKQLFVEQHKHYLDELLEQISEFSKRVILADANLDKVLSAYNKHRDKPIREQAENLLHLFTLTNLGAPAAFKYFDTTIDRKRYTSTKEVLDATLIHQSITGLYETRIDLSQLGGDSGGSPKKKRKV

SEQ ID NO: 294 - protein, 1623 aa, Artificial Sequence
  Synthetic polypeptide
MSSETGPVAVDPTLRRRIEPHEFEVFFDPRELRKETCLLYEINWGGRHSIWRHTSQNTNKHVEVNFIEKFTTERYFCPNTRCSITWFLSWSPCGECSRAITEFLSRYPHVTLFIYIARLYHHADPRNRQGLRDLISSGVTIQIMTEQESGYCWRNFVNYSPSNEAHWPRYPHLWVRLYVLELYCLLLGLPPCLNILRRKQPQLTFFTIALQSCHYQRLPPHILWATGLKSGSETPGTSESATPESDKKYSIGLAIGTNSVGWAVITDEYKVPSKKFKVLGNTDRHSIKKNLIGALLFDSGETAEATRLKRTARRRYTRRKNRICYLQEIFSNEMAKVDDSFFHRLEESFLVEEDKKHERHPIFGNIVDEVAYHEKYPTIYHLRKKLVDSTDKADLRLIYLALAHMIKFRGHFLIEGDLNPDNSDVDKLFIQLVQTYNQLFEENPINASGVDAKAILSARLSKSRRLENLIAQLPGEKKNGLFGNLIALSLGLTPNFKSNFDLAEDAKLQLSKDTYDDDLDNLLAQIGDQYADLFLAAKNLSDAILLSDILRVNTEITKAPLSASMIKRYDEHHQDLTLLKALVRQQLPEKYKEIFFDQSKNGYAGYIDGGASQEEFYKFIKPILEKMDGTEELLVKLNREDLLRKQRTFDNGSIPHQIHLGELHAILRRQEDFYPFLKDNREKIEKILTFRIPYYVGPLARGNSRFAWMTRKSEETITPWNFEEVVDKGASAQSFIERMTNFDKNLPNEKVLPKHSLLYEYFTVYNELTKVKYVTEGMRKPAFLSGEQKKAIVDLLFKTNRKVTVKQLKEDYFKKIECFDSVEISGVEDRFNASLGTYHDLLKLLKDKDFLDNEENEDILEDIVLTLTLFEDREMIEERLKTYAHLFDDKVMKQLKRRRYTGWGRLSRKLINGIRDKQSGKTILDFLKSDGFANRNFMQLIHDDSLTFKEDIQKAQVSGQGDSLHEHIANLAGSPAIKKGILQTVKVVDELVKVMGRHKPENIVIEMARENQTTQKGQKNSRERMKRIEEGIKELGSQILKEHPVENTQLQNEKLYLYYLQNGRDMYVDQELDINRLSDYDVDAIVPQSFLKDDSIDNKVLTRSDKNRGKSDNVPSEEVVKKMKNYWRQLLNAKLITQRKFDNLTKAERGGLSELDKAGFIKRQLVETRQITKHVAQILDSRMNTKYDENDKLIREVKVITLKSKLVSDFRKDFQFYKVREINNYHHAHDAYLNAVVGTALIKKYPKLESEFVYGDYKVYDVRKMIAKSEQEIGKATAKYFFYSNIMNFFKTEITLANGEIRKRPLIETNGETGEIVWDKGRDFATVRKVLSMPQVNIVKKTEVQTGGFSKESILPKRNSDKLIARKKDWDPKKYGGFDSPTVAYSVLVVAKVEKGKSKKLKSVKELLGITIMERSSFEKNPIDFLEAKGYKEVKKDLLLKLPKYSLFELENGRKRMLASAGELQKGNELALPSKYVNFLYLASHYEKLKGSPEDNEQKQLFVEQHKHYLDELLEQISEFSKRVILADANLDKVLSAYNKHRDKPIREQAENLLHLFTLTNLGAPAAFKYFDTTIDRKRYTSTKEVLDATLIHQSITGLYETRIDLSQLGGDSGGSPKKKRKV

SEQ ID NO: 295 - protein, 1630 aa, Artificial Sequence
  Synthetic polypeptide
MTSEKGPSTGDPTLRRRIEPWEFDVFYDPRELRKEACLLYEIKWGMSRKIWRSSGKNTTNHVEVNFIKKFTSERDFHPSMSCSITWFLSWSPCWECSQAIREFLSRHPGVTLVIYVARLFWHMDQQNRQGLRDLVNSGVTIQIMRASEYYHCWRNFVNYPPGDEAHWPQYPPLWMMLYALELHCIILSLPPCLKISRRWQNHLTFFRLHLQNCHYQTIPPHILLATGLIHPSVAWRSGSETPGTSESATPESDKKYSIGLAIGTNSVGWAVITDEYKVPSKKFKVLGNTDRHSIKKNLIGALLFDSGETAEATRLKRTARRRYTRRKNRICYLQEIFSNEMAKVDDSFFHRLEESFLVEEDKKHERHPIFGNIVDEVAYHEKYPTIYHLRKKLVDSTDKADLRLIYLALAHMIKFRGHFLIEGDLNPDNSDVDKLFIQLVQTYNQLFEENPINASGVDAKAILSARLSKSRRLENLIAQLPGEKKNGLFGNLIALSLGLTPNFKSNFDLAEDAKLQLSKDTYDDDLDNLLAQIGDQYADLFLAAKNLSDAILLSDILRVNTEITKAPLSASMIKRYDEHHQDLTLLKALVRQQLPEKYKEIFFDQSKNGYAGYIDGGASQEEFYKFIKPILEKMDGTEELLVKLNREDLLRKQRTFDNGSIPHQIHLGELHAILRRQEDFYPFLKDNREKIEKILTFRIPYYVGPLARGNSRFAWMTRKSEETITPWNFEEVVDKGASAQSFIERMTNFDKNLPNEKVLPKHSLLYEYFTVYNELTKVKYVTEGMRKPAFLSGEQKKAIVDLLFKTNRKVTVKQLKEDYFKKIECFDSVEISGVEDRFNASLGTYHDLLKIIKDKDFLDNEENEDILEDIVLTLTLFEDREMIEERLKTYAHLFDDKVMKQLKRRRYTGWGRLSRKLINGIRDKQSGKTILDFLKSDGFANRNFMQLIHDDSLTFKEDIQKAQVSGQGDSLHEHIANLAGSPAIKKGILQTVKVVDELVKVMGRHKPENIVIEMARENQTTQKGQKNSRERMKRIEEGIKELGSQILKEHPVENTQLQNEKLYLYYLQNGRDMYVDQELDINRLSDYDVDAIVPQSFLKDDSIDNKVLTRSDKNRGKSDNVPSEEVVKKMKNYWRQLLNAKLITQRKFDNLTKAERGGLSELDKAGFIKRQLVETRQITKHVAQILDSRMNTKYDENDKLIREVKVITLKSKLVSDFRKDFQFYKVREINNYHHAHDAYLNAVVGTALIKKYPKLESEFVYGDYKVYDVRKMIAKSEQEIGKATAKYFFYSNIMNFFKTEITLANGEIRKRPLIETNGETGEIVWDKGRDFATVRKVLSMPQVNIVKKTEVQTGGFSKESILPKRNSDKLIARKKDWDPKKYGGFDSPTVAYSVLVVAKVEKGKSKKLKSVKELLGITIMERSSFEKNPIDFLEAKGYKEVKKDLIIKLPKYSLFELENGRKRMLASAGELQKGNELALPSKYVNFLYLASHYEKLKGSPEDNEQKQLFVEQHKHYLDEIIEQISEFSKRVILADANLDKVLSAYNKHRDKPIREQAENIIHLFTLTNLGAPAAFKYFDTTIDRKRYTSTKEVLDATLIHQSITGLYETRIDLSQLGGDSGGSPKKKRKV

SEQ ID NO: 296 - protein, 1710 aa, Artificial Sequence
  Synthetic polypeptide
MSSETGPVAVDPTLRRRIEPHEFEVFFDPRELRKETCLLYEINWGGRHSIWRHTSQNTNKHVEVNFIEKFTTERYFCPNTRCSITWFLSWSPCGECSRAITEFLSRYPHVTLFIYIARLYHHADPRNRQGLRDLISSGVTIQIMTEQESGYCWRNFVNYSPSNEAHWPRYPHLWVRLYVLELYCLLLGLPPCLNILRRKQPQLTFFTIALQSCHYQRLPPHILWATGLKSGSETPGTSESATPESDKKYSIGLAIGTNSVGWAVITDEYKVPSKKFKVLGNTDRHSIKKNLIGALLFDSGETAEATRLKRTARRRYTRRKNRICYLQEIFSNEMAKVDDSFFHRLEESFLVEEDKKHERHPIFGNIVDEVAYHEKYPTIYHLRKKLVDSTDKADLRLIYLALAHMIKFRGHFLIEGDLNPDNSDVDKLFIQLVQTYNQLFEENPINASGVDAKAILSARLSKSRRLENLIAQLPGEKKNGLFGNLIALSLGLTPNFKSNFDLAEDAKLQLSKDTYDDDLDNLLAQIGDQYADLFLAAKNLSDAILLSDILRVNTEITKAPLSASMIKRYDEHHQDLTLLKALVRQQLPEKYKEIFFDQSKNGYAGYIDGGASQEEFYKFIKPILEKMDGTEELLVKLNREDLLRKQRTFDNGSIPHQIHLGELHAILRRQEDFYPFLKDNREKIEKILTFRIPYYVGPLARGNSRFAWMTRKSEETITPWNFEEVVDKGASAQSFIERMTNFDKNLPNEKVLPKHSLLYEYFTVYNELTKVKYVTEGMRKPAFLSGEQKKAIVDLLFKTNRKVTVKQLKEDYFKKIECFDSVEISGVEDRFNASLGTYHDLLKLLKDKDFLDNEENEDILEDIVLTLTLFEDREMIEERLKTYAHLFDDKVMKQLKRRRYTGWGRLSRKLINGIRDKQSGKTILDFLKSDGFANRNFMQLIHDDSLTFKEDIQKAQVSGQGDSLHEHIANLAGSPAIKKGILQTVKVVDELVKVMGRHKPENIVIEMARENQTTQKGQKNSRERMKRIEEGIKELGSQILKEHPVENTQLQNEKLYLYYLQNGRDMYVDQELDINRLSDYDVDAIVPQSFLKDDSIDNKVLTRSDKNRGKSDNVPSEEVVKKMKNYWRQLLNAKLITQRKFDNLTKAERGGLSELDKAGFIKRQLVETRQITKHVAQILDSRMNTKYDENDKLIREVKVITLKSKLVSDFRKDFQFYKVREINNYHHAHDAYLNAVVGTALIKKYPKLESEFVYGDYKVYDVRKMIAKSEQEIGKATAKYFFYSNIMNFFKTEITLANGEIRKRPLIETNGETGEIVWDKGRDFATVRKVLSMPQVNIVKKTEVQTGGFSKESILPKRNSDKLIARKKDWDPKKYGGFDSPTVAYSVLVVAKVEKGKSKKLKSVKELLGITIMERSSFEKNPIDFLEAKGYKEVKKDLLLKLPKYSLFELENGRKRMLASAGELQKGNELALPSKYVNFLYLASHYEKLKGSPEDNEQKQLFVEQHKHYLDELLEQISEFSKRVILADANLDKVLSAYNKHRDKPIREQAENLLHLFTLTNLGAPAAFKYFDTTIDRKRYTSTKEVLDATLIHQSITGLYETRIDLSQLGGDSGGSTNLSDLLEKETGKQLVIQESILMLPEEVEEVIGNKPESDILVHTAYDESTDENVMLLTSDAPEYKPWALVIQDSNGENKIKMLSGGSPKKKRKV

SEQ ID NO: 297 - protein, 1710 aa, Artificial Sequence
  Synthetic polypeptide
MSSETGPVAVDPTLRRRIEPHEFEVFFDPRELRKETCLLYEINWGGRHSIWRHTSQNTNKHVEVNFIEKFTTERYFCPNTRCSITWFLSWSPCGECSRAITEFLSRYPHVTLFIYIARLYHHADPRNRQGLRDLISSGVTIQIMTEQESGYCWRNFVNYSPSNEAHWPRYPHLWVRLYVLELYCLLLGLPPCLNILRRKQPQLTFFTIALQSCHYQRLPPHILWATGLKSGSETPGTSESATPESDKKYSIGLAIGTNSVGWAVITDEYKVPSKKFKVLGNTDRHSIKKNLIGALLFDSGETAEATRLKRTARRRYTRRKNRICYLQEIFSNEMAKVDDSFFHRLEESFLVEEDKKHERHPIFGNIVDEVAYHEKYPTIYHLRKKLVDSTDKADLRLIYLALAHMIKFRGHFLIEGDLNPDNSDVDKLFIQLVQTYNQLFEENPINASGVDAKAILSARLSKSRRLENLIAQLPGEKKNGLFGNLIALSLGLTPNFKSNFDLAEDAKLQLSKDTYDDDLDNLLAQIGDQYADLFLAAKNLSDAILLSDILRVNTEITKAPLSASMIKRYDEHHQDLTLLKALVRQQLPEKYKEIFFDQSKNGYAGYIDGGASQEEFYKFIKPILEKMDGTEELLVKLNREDLLRKQRTFDNGSIPHQIHLGELHAILRRQEDFYPFLKDNREKIEKILTFRIPYYVGPLARGNSRFAWMTRKSEETITPWNFEEVVDKGASAQSFIERMTNFDKNLPNEKVLPKHSLLYEYFTVYNELTKVKYVTEGMRKPAFLSGEQKKAIVDLLFKTNRKVTVKQLKEDYFKKIECFDSVEISGVEDRFNASLGTYHDLLKLLKDKDFLDNEENEDILEDIVLTLTLFEDREMIEERLKTYAHLFDDKVMKQLKRRRYTGWGRLSRKLINGIRDKQSGKTILDFLKSDGFANRNFMQLIHDDSLTFKEDIQKAQVSGQGDSLHEHIANLAGSPAIKKGILQTVKVVDELVKVMGRHKPENIVIEMARENQTTQKGQKNSRERMKRIEEGIKELGSQILKEHPVENTQLQNEKLYLYYLQNGRDMYVDQELDINRLSDYDVDHIVPQSFLKDDSIDNKVLTRSDKNRGKSDNVPSEEVVKKMKNYWRQLLNAKLITQRKFDNLTKAERGGLSELDKAGFIKRQLVETRQITKHVAQILDSRMNTKYDENDKLIREVKVITLKSKLVSDFRKDFQFYKVREINNYHHAHDAYLNAVVGTALIKKYPKLESEFVYGDYKVYDVRKMIAKSEQEIGKATAKYFFYSNIMNFFKTEITLANGEIRKRPLIETNGETGEIVWDKGRDFATVRKVLSMPQVNIVKKTEVQTGGFSKESILPKRNSDKLIARKKDWDPKKYGGFDSPTVAYSVLVVAKVEKGKSKKLKSVKELLGITIMERSSFEKNPIDFLEAKGYKEVKKDLLLKLPKYSLFELENGRKRMLASAGELQKGNELALPSKYVNFLYLASHYEKLKGSPEDNEQKQLFVEQHKHYLDELLEQISEFSKRVILADANLDKVLSAYNKHRDKPIREQAENLLHLFTLTNLGAPAAFKYFDTTIDRKRYTSTKEVLDATLIHQSITGLYETRIDLSQLGGDSGGSTNLSDLLEKETGKQLVIQESILMLPEEVEEVIGNKPESDILVHTAYDESTDENVMLLTSDAPEYKPWALVIQDSNGENKIKMLSGGSPKKKRKV

SEQ ID NO: 298 - protein, 1679 aa, Artificial Sequence
  Synthetic polypeptide
MTDAEYVRIHEKLDIYTFKKQFFNNKKSVSHRCYVLFELKRRGERRACFWGYAVNKPQSGTERGIHAEIFSIRKVEEYLRDNPGQFTINWYSSWSPCADCAEKILEWYNQELRGNGHTLKIWACKLYYEKNARNQIGLWNLRDNGVGLNVMVSEHYQCCRKIFIQSSHNQLNENRWLEKTLKRAEKRRSELSIMIQVKILHTTKSPAVSGSETPGTSESATPESDKKYSIGLAIGTNSVGWAVITDEYKVPSKKFKVLGNTDRHSIKKNLIGALLFDSGETAEATRLKRTARRRYTRRKNRICYLQEIFSNEMAKVDDSFFHRLEESFLVEEDKKHERHPIFGNIVDEVAYHEKYPTIYHLRKKLVDSTDKADLRLIYLALAHMIKFRGHFLIEGDLNPDNSDVDKLFIQLVQTYNQLFEENPINASGVDAKAILSARLSKSRRLENLIAQLPGEKKNGLFGNLIALSLGLTPNFKSNFDLAEDAKLQLSKDTYDDDLDNLLAQIGDQYADLFLAAKNLSDAILLSDILRVNTEITKAPLSASMIKRYDEHHQDLTLLKALVRQQLPEKYKEIFFDQSKNGYAGYIDGGASQEEFYKFIKPILEKMDGTEELLVKLNREDLLRKQRTFDNGSIPHQIHLGELHAILRRQEDFYPFLKDNREKIEKILTFRIPYYVGPLARGNSRFAWMTRKSEETITPWNFEEVVDKGASAQSFIERMTNFDKNLPNEKVLPKHSLLYEYFTVYNELTKVKYVTEGMRKPAFLSGEQKKAIVDLLFKTNRKVTVKQLKEDYFKKIECFDSVEISGVEDRFNASLGTYHDLLKIIKDKDFLDNEENEDILEDIVLTLTLFEDREMIEERLKTYAHLFDDKVMKQLKRRRYTGWGRLSRKLINGIRDKQSGKTILDFLKSDGFANRNFMQLIHDDSLTFKEDIQKAQVSGQGDSLHEHIANLAGSPAIKKGILQTVKVVDELVKVMGRHKPENIVIEMARENQTTQKGQKNSRERMKRIEEGIKELGSQILKEHPVENTQLQNEKLYLYYLQNGRDMYVDQELDINRLSDYDVDAIVPQSFLKDDSIDNKVLTRSDKNRGKSDNVPSEEVVKKMKNYWRQLLNAKLITQRKFDNLTKAERGGLSELDKAGFIKRQLVETRQITKHVAQILDSRMNTKYDENDKLIREVKVITLKSKLVSDFRKDFQFYKVREINNYHHAHDAYLNAVVGTALIKKYPKLESEFVYGDYKVYDVRKMIAKSEQEIGKATAKYFFYSNIMNFFKTEITLANGEIRKRPLIETNGETGEIVWDKGRDFATVRKVLSMPQVNIVKKTEVQTGGFSKESILPKRNSDKLIARKKDWDPKKYGGFDSPTVAYSVLVVAKVEKGKSKKLKSVKELLGITIMERSSFEKNPIDFLEAKGYKEVKKDLIIKLPKYSLFELENGRKRMLASAGELQKGNELALPSKYVNFLYLASHYEKLKGSPEDNEQKQLFVEQHKHYLDEIIEQISEFSKRVILADANLDKVLSAYNKHRDKPIREQAENIIHLFTLTNLGAPAAFKYFDTTIDRKRYTSTKEVLDATLIHQSITGLYETRIDLSQLGGDSGGSMTNLSDIIEKETGKQLVIQESILMLPEEVEEVIGNKPESDILVHTAYDESTDENVMLLTSDAPEYKPWALVIQDSNGENKIKML

SEQ ID NO: 299 - protein, 1689 aa, Artificial Sequence
  Synthetic polypeptide
MTDAEYVRIHEKLDIYTFKKQFFNNKKSVSHRCYVLFELKRRGERRACFWGYAVNKPQSGTERGIHAEIFSIRKVEEYLRDNPGQFTINWYSSWSPCADCAEKILEWYNQELRGNGHTLKIWACKLYYEKNARNQIGLWNLRDNGVGLNVMVSEHYQCCRKIFIQSSHNQLNENRWLEKTLKRAEKRRSELSIMIQVKILHTTKSPAVSGSETPGTSESATPESDKKYSIGLAIGTNSVGWAVITDEYKVPSKKFKVLGNTDRHSIKKNLIGALLFDSGETAEATRLKRTARRRYTRRKNRICYLQEIFSNEMAKVDDSFFHRLEESFLVEEDKKHERHPIFGNIVDEVAYHEKYPTIYHLRKKLVDSTDKADLRLIYLALAHMIKFRGHFLIEGDLNPDNSDVDKLFIQLVQTYNQLFEENPINASGVDAKAILSARLSKSRRLENLIAQLPGEKKNGLFGNLIALSLGLTPNFKSNFDLAEDAKLQLSKDTYDDDLDNLLAQIGDQYADLFLAAKNLSDAILLSDILRVNTEITKAPLSASMIKRYDEHHQDLTLLKALVRQQLPEKYKEIFFDQSKNGYAGYIDGGASQEEFYKFIKPILEKMDGTEELLVKLNREDLLRKQRTFDNGSIPHQIHLGELHAILRRQEDFYPFLKDNREKIEKILTFRIPYYVGPLARGNSRFAWMTRKSEETITPWNFEEVVDKGASAQSFIERMTNFDKNLPNEKVLPKHSLLYEYFTVYNELTKVKYVTEGMRKPAFLSGEQKKAIVDLLFKTNRKVTVKQLKEDYFKKIECFDSVEISGVEDRFNASLGTYHDLLKIIKDKDFLDNEENEDILEDIVLTLTLFEDREMIEERLKTYAHLFDDKVMKQLKRRRYTGWGRLSRKLINGIRDKQSGKTILDFLKSDGFANRNFMQLIHDDSLTFKEDIQKAQVSGQGDSLHEHIANLAGSPAIKKGILQTVKVVDELVKVMGRHKPENIVIEMARENQTTQKGQKNSRERMKRIEEGIKELGSQILKEHPVENTQLQNEKLYLYYLQNGRDMYVDQELDINRLSDYDVDHIVPQSFLKDDSIDNKVLTRSDKNRGKSDNVPSEEVVKKMKNYWRQLLNAKLITQRKFDNLTKAERGGLSELDKAGFIKRQLVETRQITKHVAQILDSRMNTKYDENDKLIREVKVITLKSKLVSDFRKDFQFYKVREINNYHHAHDAYLNAVVGTALIKKYPKLESEFVYGDYKVYDVRKMIAKSEQEIGKATAKYFFYSNIMNFFKTEITLANGEIRKRPLIETNGETGEIVWDKGRDFATVRKVLSMPQVNIVKKTEVQTGGFSKESILPKRNSDKLIARKKDWDPKKYGGFDSPTVAYSVLVVAKVEKGKSKKLKSVKELLGITIMERSSFEKNPIDFLEAKGYKEVKKDLIIKLPKYSLFELENGRKRMLASAGELQKGNELALPSKYVNFLYLASHYEKLKGSPEDNEQKQLFVEQHKHYLDEIIEQISEFSKRVILADANLDKVLSAYNKHRDKPIREQAENIIHLFTLTNLGAPAAFKYFDTTIDRKRYTSTKEVLDATLIHQSITGLYETRIDLSQLGGDSGGSTNLSDIIEKETGKQLVIQESILMLPEEVEEVIGNKPESDILVHTAYDESTDENVMLLTSDAPEYKPWALVIQDSNGENKIKMLSGGSPKKKRKV

SEQ ID NO: 300 - protein, 1655 aa, Artificial Sequence
  Synthetic polypeptide
MDPPTFTFNFNNEPWVRGRHETYLCYEVERMHNDTWVLLNQRRGFLCNQAPHKHGFLEGRHAELCFLDVIPFWKLDLDQDYRVTCFTSWSPCFSCAQEMAKFISKNKHVSLCIFTARIYDDQGRCQEGLRTLAEAGAKISIMTYSEFKHCWDTFVDHQGCPFQPWDGLDEHSQDLSGRLRAILQSGSETPGTSESATPESDKKYSIGLAIGTNSVGWAVITDEYKVPSKKFKVLGNTDRHSIKKNLIGALLFDSGETAEATRLKRTARRRYTRRKNRICYLQEIFSNEMAKVDDSFFHRLEESFLVEEDKKHERHPIFGNIVDEVAYHEKYPTIYHLRKKLVDSTDKADLRLIYLALAHMIKFRGHFLIEGDLNPDNSDVDKLFIQLVQTYNQLFEENPINASGVDAKAILSARLSKSRRLENLIAQLPGEKKNGLFGNLIALSLGLTPNFKSNFDLAEDAKLQLSKDTYDDDLDNLLAQIGDQYADLFLAAKNLSDAILLSDILRVNTEITKAPLSASMIKRYDEHHQDLTLLKALVRQQLPEKYKEIFFDQSKNGYAGYIDGGASQEEFYKFIKPILEKMDGTEELLVKLNREDLLRKQRTFDNGSIPHQIHLGELHAILRRQEDFYPFLKDNREKIEKILTFRIPYYVGPLARGNSRFAWMTRKSEETITPWNFEEVVDKGASAQSFIERMTNFDKNLPNEKVLPKHSLLYEYFTVYNELTKVKYVTEGMRKPAFLSGEQKKAIVDLLFKTNRKVTVKQLKEDYFKKIECFDSVEISGVEDRFNASLGTYHDLLKIIKDKDFLDNEENEDILEDIVLTLTLFEDREMIEERLKTYAHLFDDKVMKQLKRRRYTGWGRLSRKLINGIRDKQSGKTILDFLKSDGFANRNFMQLIHDDSLTFKEDIQKAQVSGQGDSLHEHIANLAGSPAIKKGILQTVKVVDELVKVMGRHKPENIVIEMARENQTTQKGQKNSRERMKRIEEGIKELGSQILKEHPVENTQLQNEKLYLYYLQNGRDMYVDQELDINRLSDYDVDAIVPQSFLKDDSIDNKVLTRSDKNRGKSDNVPSEEVVKKMKNYWRQLLNAKLITQRKFDNLTKAERGGLSELDKAGFIKRQLVETRQITKHVAQILDSRMNTKYDENDKLIREVKVITLKSKLVSDFRKDFQFYKVREINNYHHAHDAYLNAVVGTALIKKYPKLESEFVYGDYKVYDVRKMIAKSEQEIGKATAKYFFYSNIMNFFKTEITLANGEIRKRPLIETNGETGEIVWDKGRDFATVRKVLSMPQVNIVKKTEVQTGGFSKESILPKRNSDKLIARKKDWDPKKYGGFDSPTVAYSVLVVAKVEKGKSKKLKSVKELLGITIMERSSFEKNPIDFLEAKGYKEVKKDLIIKLPKYSLFELENGRKRMLASAGELQKGNELALPSKYVNFLYLASHYEKLKGSPEDNEQKQLFVEQHKHYLDEIIEQISEFSKRVILADANLDKVLSAYNKHRDKPIREQAENIIHLFTLTNLGAPAAFKYFDTTIDRKRYTSTKEVLDATLIHQSITGLYETRIDLSQLGGDSGGSMTNLSDIIEKETGKQLVIQESILMLPEEVEEVIGNKPESDILVHTAYDESTDENVMLLTSDAPEYKPWALVIQDSNGENKIKML

SEQ ID NO: 301 - protein, 1665 aa, Artificial Sequence
  Synthetic polypeptide
MDPPTFTFNFNNEPWVRGRHETYLCYEVERMHNDTWVLLNQRRGFLCNQAPHKHGFLEGRHAELCFLDVIPFWKLDLDQDYRVTCFTSWSPCFSCAQEMAKFISKNKHVSLCIFTARIYDDQGRCQEGLRTLAEAGAKISIMTYSEFKHCWDTFVDHQGCPFQPWDGLDEHSQDLSGRLRAILQSGSETPGTSESATPESDKKYSIGLAIGTNSVGWAVITDEYKVPSKKFKVLGNTDRHSIKKNLIGALLFDSGETAEATRLKRTARRRYTRRKNRICYLQEIFSNEMAKVDDSFFHRLEESFLVEEDKKHERHPIFGNIVDEVAYHEKYPTIYHLRKKLVDSTDKADLRLIYLALAHMIKFRGHFLIEGDLNPDNSDVDKLFIQLVQTYNQLFEENPINASGVDAKAILSARLSKSRRLENLIAQLPGEKKNGLFGNLIALSLGLTPNFKSNFDLAEDAKLQLSKDTYDDDLDNLLAQIGDQYADLFLAAKNLSDAILLSDILRVNTEITKAPLSASMIKRYDEHHQDLTLLKALVRQQLPEKYKEIFFDQSKNGYAGYIDGGASQEEFYKFIKPILEKMDGTEELLVKLNREDLLRKQRTFDNGSIPHQIHLGELHAILRRQEDFYPFLKDNREKIEKILTFRIPYYVGPLARGNSRFAWMTRKSEETITPWNFEEVVDKGASAQSFIERMTNFDKNLPNEKVLPKHSLLYEYFTVYNELTKVKYVTEGMRKPAFLSGEQKKAIVDLLFKTNRKVTVKQLKEDYFKKIECFDSVEISGVEDRFNASLGTYHDLLKIIKDKDFLDNEENEDILEDIVLTLTLFEDREMIEERLKTYAHLFDDKVMKQLKRRRYTGWGRLSRKLINGIRDKQSGKTILDFLKSDGFANRNFMQLIHDDSLTFKEDIQKAQVSGQGDSLHEHIANLAGSPAIKKGILQTVKVVDELVKVMGRHKPENIVIEMARENQTTQKGQKNSRERMKRIEEGIKELGSQILKEHPVENTQLQNEKLYLYYLQNGRDMYVDQELDINRLSDYDVDHIVPQSFLKDDSIDNKVLTRSDKNRGKSDNVPSEEVVKKMKNYWRQLLNAKLITQRKFDNLTKAERGGLSELDKAGFIKRQLVETRQITKHVAQILDSRMNTKYDENDKLIREVKVITLKSKLVSDFRKDFQFYKVREINNYHHAHDAYLNAVVGTALIKKYPKLESEFVYGDYKVYDVRKMIAKSEQEIGKATAKYFFYSNIMNFFKTEITLANGEIRKRPLIETNGETGEIVWDKGRDFATVRKVLSMPQVNIVKKTEVQTGGFSKESILPKRNSDKLIARKKDWDPKKYGGFDSPTVAYSVLVVAKVEKGKSKKLKSVKELLGITIMERSSFEKNPIDFLEAKGYKEVKKDLIIKLPKYSLFELENGRKRMLASAGELQKGNELALPSKYVNFLYLASHYEKLKGSPEDNEQKQLFVEQHKHYLDEIIEQISEFSKRVILADANLDKVLSAYNKHRDKPIREQAENIIHLFTLTNLGAPAAFKYFDTTIDRKRYTSTKEVLDATLIHQSITGLYETRIDLSQLGGDSGGSTNLSDIIEKETGKQLVIQESILMLPEEVEEVIGNKPESDILVHTAYDESTDENVMLLTSDAPEYKPWALVIQDSNGENKIKMLSGGSPKKKRKV

SEQ ID NO: 302 - protein, 1665 aa, Artificial Sequence
  Synthetic polypeptide
MDPPTFTFNFNNEPWVRGRHETYLCYEVERMHNDTWVLLNQRRGFLCNQAPHKHGFLEGRHAELCFLDVIPFWKLDLDQDYRVTCFTSWSPCFSCAQEMAKFISKNKHVSLCIFTARIYRRQGRCQEGLRTLAEAGAKISIMTYSEFKHCWDTFVDHQGCPFQPWDGLDEHSQDLSGRLRAILQSGSETPGTSESATPESDKKYSIGLAIGTNSVGWAVITDEYKVPSKKFKVLGNTDRHSIKKNLIGALLFDSGETAEATRLKRTARRRYTRRKNRICYLQEIFSNEMAKVDDSFFHRLEESFLVEEDKKHERHPIFGNIVDEVAYHEKYPTIYHLRKKLVDSTDKADLRLIYLALAHMIKFRGHFLIEGDLNPDNSDVDKLFIQLVQTYNQLFEENPINASGVDAKAILSARLSKSRRLENLIAQLPGEKKNGLFGNLIALSLGLTPNFKSNFDLAEDAKLQLSKDTYDDDLDNLLAQIGDQYADLFLAAKNLSDAILLSDILRVNTEITKAPLSASMIKRYDEHHQDLTLLKALVRQQLPEKYKEIFFDQSKNGYAGYIDGGASQEEFYKFIKPILEKMDGTEELLVKLNREDLLRKQRTFDNGSIPHQIHLGELHAILRRQEDFYPFLKDNREKIEKILTFRIPYYVGPLARGNSRFAWMTRKSEETITPWNFEEVVDKGASAQSFIERMTNFDKNLPNEKVLPKHSLLYEYFTVYNELTKVKYVTEGMRKPAFLSGEQKKAIVDLLFKTNRKVTVKQLKEDYFKKIECFDSVEISGVEDRFNASLGTYHDLLKIIKDKDFLDNEENEDILEDIVLTLTLFEDREMIEERLKTYAHLFDDKVMKQLKRRRYTGWGRLSRKLINGIRDKQSGKTILDFLKSDGFANRNFMQLIHDDSLTFKEDIQKAQVSGQGDSLHEHIANLAGSPAIKKGILQTVKVVDELVKVMGRHKPENIVIEMARENQTTQKGQKNSRERMKRIEEGIKELGSQILKEHPVENTQLQNEKLYLYYLQNGRDMYVDQELDINRLSDYDVDHIVPQSFLKDDSIDNKVLTRSDKNRGKSDNVPSEEVVKKMKNYWRQLLNAKLITQRKFDNLTKAERGGLSELDKAGFIKRQLVETRQITKHVAQILDSRMNTKYDENDKLIREVKVITLKSKLVSDFRKDFQFYKVREINNYHHAHDAYLNAVVGTALIKKYPKLESEFVYGDYKVYDVRKMIAKSEQEIGKATAKYFFYSNIMNFFKTEITLANGEIRKRPLIETNGETGEIVWDKGRDFATVRKVLSMPQVNIVKKTEVQTGGFSKESILPKRNSDKLIARKKDWDPKKYGGFDSPTVAYSVLVVAKVEKGKSKKLKSVKELLGITIMERSSFEKNPIDFLEAKGYKEVKKDLIIKLPKYSLFELENGRKRMLASAGELQKGNELALPSKYVNFLYLASHYEKLKGSPEDNEQKQLFVEQHKHYLDEIIEQISEFSKRVILADANLDKVLSAYNKHRDKPIREQAENIIHLFTLTNLGAPAAFKYFDTTIDRKRYTSTKEVLDATLIHQSITGLYETRIDLSQLGGDSGGSTNLSDIIEKETGKQLVIQESILMLPEEVEEVIGNKPESDILVHTAYDESTDENVMLLTSDAPEYKPWALVIQDSNGENKIKMLSGGSPKKKRKV

SEQ ID NO: 303 - protein, 198 aa, homo sapiens [sequence omitted]

SEQ ID NO: 304 - protein, 84 aa, Bacillus phage PBS2
MTNLSDIIEKETGKQLVIQESILMLPEEVEEVIGNKPESDILVHTAYDESTDENVMLLTSDAPEYKPWALVIQDSNGENKIKML

SEQ ID NO: 305 - protein, 181 aa, Erwinia tasmaniensis
MASRGVNKVILVGNLGQDPEVRYMPNGGAVANITLATSESWRDKQTGETKEKTEWHRVVLFGKLAEVAGEYLRKGSQVYIEGALQTRKWTDQAGVEKYTTEVVVNVGGTMQMLGGRSQGGGASAGGQNGGSNNGWGQPQQPQGGNQFSGGAQQQARPQQQPQQNNAPANNEPPIDFDDDIP

SEQ ID NO: 306 - protein, 209 aa, Artificial Sequence
  Synthetic polypeptide
MAGAQDFVPHTADLAELAAAAGECRGCGLYRDATQAVFGAGGRSARIMMIGEQPGDKEDLAGLPFVGPAGRLLDRALEAADIDRDALYVTNAVKHFKFTRAAGGKRRIHKTPSRTEVVACRPWLIAEMTSVEPDVVVLLGATAAKALLGNDFRVTQHRGEVLHVDDVPGDPALVATVHPSSLLRGPKEERESAFAGLVDDLRVAADVRP

SEQ ID NO: 307 - protein, 313 aa, Artificial Sequence
  Synthetic polypeptide
MIGQKTLYSFFSPSPARKRHAPSPEPAVQGTGVAGVPEESGDAAAIPAKKAPAGQEEPGTPPSSPLSAEQLDRIQRNKAAALLRLAARNVPVGFGESWKKHLSGEFGKPYFIKLMGFVAEERKHYTVYPPPHQVFTWTQMCDIKDVKVVILGQEPYHGPNQAHGLCFSVQRPVPPPPSLENIYKELSTDIEDFVHPGHGDLSGWAKQGVLLLNAVLTVRAHQANSHKERGWEQFTDAVVSWLNQNSNGLVFLLWGSYAQKKGSAIDRKRHHVLQTAHPSPLSVYRGFFGCRHFSKTNELLQKSGKKPIDWKEL

SEQ ID NO: 308 - protein, 5 aa, Artificial Sequence
  Synthetic polypeptide
GGGGS

SEQ ID NO: 309 - protein, 5 aa, Artificial Sequence
  Synthetic polypeptide
EAAAK

SEQ ID NO: 310 - protein, 16 aa, Artificial Sequence
  Synthetic polypeptide
SGSETPGTSESATPES

SEQ ID NO: 311 - protein, 15 aa, Artificial Sequence
  Synthetic polypeptide
VPFLLEPDNINGKTC

SEQ ID NO: 312 - protein, 12 aa, Artificial Sequence
  Synthetic polypeptide
GSAGSAAGSGEF

SEQ ID NO: 313 - protein, 12 aa, Artificial Sequence
  Synthetic polypeptide
SIVAQLSRPDPA

SEQ ID NO: 314 - protein, 10 aa, Artificial Sequence
  Synthetic polypeptide
MKIIEQLPSA

SEQ ID NO: 315 - protein, 10 aa, Artificial Sequence
  Synthetic polypeptide
VRHKLKRVGS

SEQ ID NO: 316 - protein, 12 aa, Artificial Sequence
  Synthetic polypeptide
GHGTGSTGSGSS

SEQ ID NO: 317 - protein, 7 aa, Artificial Sequence
  Synthetic polypeptide
MSRPDPA

SEQ ID NO: 318 - protein, 12 aa, Artificial Sequence
  Synthetic polypeptide
SGSETPGTSESA

SEQ ID NO: 319 - protein, 21 aa, Artificial Sequence
  Synthetic polypeptide
SGSETPGTSESATPEGGSGGS

SEQ ID NO: 320 - protein, 4 aa, Artificial Sequence
  Synthetic polypeptide
GGSM

SEQ ID NO: 321 - protein, 1612 aa, Artificial Sequence
  Synthetic polypeptide
MSSETGPVAVDPTLRRRIEPHEFEVFFDPRELRKETCLLYEINWGGRHSIWRHTSQNTNKHVEVNFIEKFTTERYFCPNTRCSITWFLSWSPCGECSRAITEFLSRYPHVTLFIYIARLYHHADPRNRQGLRDLISSGVTIQIMTEQESGYCWRNFVNYSPSNEAHWPRYPHLWVRLYVLELYCIILGLPPCLNILRRKQPQLTFFTIALQSCHYQRLPPHILWATGLKSGSETPGTSESATPESDKKYSIGLAIGTNSVGWAVITDEYKVPSKKFKVLGNTDRHSIKKNLIGALLFDSGETAEATRLKRTARRRYTRRKNRICYLQEIFSNEMAKVDDSFFHRLEESFLVEEDKKHERHPIFGNIVDEVAYHEKYPTIYHLRKKLVDSTDKADLRLIYLALAHMIKFRGHFLIEGDLNPDNSDVDKLFIQLVQTYNQLFEENPINASGVDAKAILSARLSKSRRLENLIAQLPGEKKNGLFGNLIALSLGLTPNFKSNFDLAEDAKLQLSKDTYDDDLDNLLAQIGDQYADLFLAAKNLSDAILLSDILRVNTEITKAPLSASMIKRYDEHHQDLTLLKALVRQQLPEKYKEIFFDQSKNGYAGYIDGGASQEEFYKFIKPILEKMDGTEELLVKLNREDLLRKQRTFDNGSIPHQIHLGELHAILRRQEDFYPFLKDNREKIEKILTFRIPYYVGPLARGNSRFAWMTRKSEETITPWNFEEVVDKGASAQSFIERMTAFDKNLPNEKVLPKHSLLYEYFTVYNELTKVKYVTEGMRKPAFLSGEQKKAIVDLLFKTNRKVTVKQLKEDYFKKIECFDSVEISGVEDRFNASLGTYHDLLKIIKDKDFLDNEENEDILEDIVLTLTLFEDREMIEERLKTYAHLFDDKVMKQLKRRRYTGWGALSRKLINGIRDKQSGKTILDFLKSDGFANRNFMALIHDDSLTFKEDIQKAQVSGQGDSLHEHIANLAGSPAIKKGILQTVKVVDELVKVMGRHKPENIVIEMARENQTTQKGQKNSRERMKRIEEGIKELGSQILKEHPVENTQLQNEKLYLYYLQNGRDMYVDQELDINRLSDYDVDHIVPQSFLKDDSIDNKVLTRSDKNRGKSDNVPSEEVVKKMKNYWRQLLNAKLITQRKFDNLTKAERGGLSELDKAGFIKRQLVETRAITKHVAQILDSRMNTKYDENDKLIREVKVITLKSKLVSDFRKDFQFYKVREINNYHHAHDAYLNAVVGTALIKKYPKLESEFVYGDYKVYDVRKMIAKSEQEIGKATAKYFFYSNIMNFFKTEITLANGEIRKRPLIETNGETGEIVWDKGRDFATVRKVLSMPQVNIVKKTEVQTGGFSKESILPKRNSDKLIARKKDWDPKKYGGFDSPTVAYSVLVVAKVEKGKSKKLKSVKELLGITIMERSSFEKNPIDFLEAKGYKEVKKDLIIKLPKYSLFELENGRKRMLASAGELQKGNELALPSKYVNFLYLASHYEKLKGSPEDNEQKQLFVEQHKHYLDEIIEQISEFSKRVILADANLDKVLSAYNKHRDKPIREQAENIIHLFTLTNLGAPAAFKYFDTTIDRKRYTSTKEVLDATLIHQSITGLYETRIDLSQLGGD

SEQ ID NO: 322 - RNA, 93 nt, S. pyogenes
guuuaagagcuaugcuggaaagccacggugaaaaaguucaacuauugccugaucggaauaaauuugaacgauacgacagucggugcuuuuuuu

SEQ ID NO: 323 - RNA, 82 nt, S. pyogenes
guuuaagagcuagaaauagcaaguuuaaauaaggcuaguccguuaucaacuugaaaaaguggcaccgagucggugcuuuuuu

SEQ ID NO: 324 - RNA, 97 nt, S. thermophilus
guuuuuguacucucaagauucaauaaucuugcagaagcuacaaagauaaggcuucaugccgaaaucaacacccugucauuuuauggcaggguguuuu

SEQ ID NO: 325 - RNA, 97 nt, S. thermophilus
guuuuagagcuguguuguuuguuaaaacaacacagcgaguuaaaauaaggcuuaguccguacucaacuugaaaagguggcaccgauucgguguuuuu

SEQ ID NO: 326 - RNA, 74 nt, C. jejuni
aagaaauuuaaaaagggacuaaaauaaagaguuugcgggacucugcgggguuacaauccccuaaaaccgcuuuu

SEQ ID NO: 327 - RNA, 95 nt, F. novicida
aucuaaaauuauaaauguaccaaauaauuaaugcucuguaaucauuuaaaaguauuuugaacggaccucuguuugacacgucugaauaacuaaaa

SEQ ID NO: 328 - RNA, 109 nt, S. thermophilus2
uguaagggacgccuuacacaguuacuuaaaucuugcagaagcuacaaagauaaggcuucaugccgaaaucaacacccugucauuuuauggcaggguguuuucguuauuu

SEQ ID NO: 329 - RNA, 110 nt, M. mobile
uguauuucgaaauacagauguacaguuaagaauacauaagaaugauacaucacuaaaaaaaggcuuuaugccguaacuacuacuuauuuucaaaauaaguaguuuuuuuu

SEQ ID NO: 330 - RNA, 92 nt, L. innocua
auuguuaguauucaaaauaacauagcaaguuaaaauaaggcuuuguccguuaucaacuuuuaauuaaguagcgcuguuucggcgcuuuuuuu

SEQ ID NO: 331 - RNA, 89 nt, S. pyogenes
guuggaaccauucaaaacagcauagcaaguuaaaauaaggcuaguccguuaucaacuugaaaaaguggcaccgagucggugcuuuuuuu

SEQ ID NO: 332 - RNA, 107 nt, S. mutans
guuggaaucauucgaaacaacacagcaaguuaaaauaaggcagugauuuuuaauccaguccguacacaacuugaaaaagugcgcaccgauucggugcuuuuuuauuu

SEQ ID NO: 333 - RNA, 96 nt, S. thermophilus
uugugguuugaaaccauucgaaacaacacagcgaguuaaaauaaggcuuaguccguacucaacuugaaaagguggcaccgauucgguguuuuuuuu

SEQ ID NO: 334 - RNA, 102 nt, N. meningitidis
acauauugucgcacugcgaaaugagaaccguugcuacaauaaggccgucugaaaagaugugccgcaacgcucugccccuuaaagcuucugcuuuaaggggca

SEQ ID NO: 335 - RNA, 110 nt, P. multocida
gcauauuguugcacugcgaaaugagagacguugcuacaauaaggcuucugaaaagaaugaccguaacgcucugccccuugugauucuuaauugcaaggggcaucguuuuu

SEQ ID NO: 336 - RNA, 20 nt, Artificial Sequence
  Synthetic polynucleotide
gccuugcguuccgaggagga

SEQ ID NO: 337 - RNA, 20 nt, Artificial Sequence
  Synthetic polynucleotide
gugcuagccuugcguuccga

SEQ ID NO: 338 - RNA, 20 nt, Artificial Sequence
  Synthetic polynucleotide
ugcuagccuugcguuccgag

SEQ ID NO: 339 - RNA, 20 nt, Artificial Sequence
  Synthetic polynucleotide
gcuagccuugcguuccgagg

SEQ ID NO: 340 - RNA, 20 nt, Artificial Sequence
  Synthetic polynucleotide
cuagccuugcguuccgagga

SEQ ID NO: 341 - RNA, 20 nt, Artificial Sequence
  Synthetic polynucleotide
gccuugcguuccgaggagga

SEQ ID NO: 342 - RNA, 20 nt, Artificial Sequence
  Synthetic polynucleotide
gcguuccgaggaggacggcc

SEQ ID NO: 343 - RNA, 20 nt, Artificial Sequence
  Synthetic polynucleotide
guauccccggcgggcagccu

SEQ ID NO: 344 - RNA, 20 nt, Artificial Sequence
  Synthetic polynucleotide
gguauccccggcgggcagcc

SEQ ID NO: 345 - RNA, 20 nt, Artificial Sequence
  Synthetic polynucleotide
ccugcgcgugcucaacugcc

SEQ ID NO: 346 - RNA, 20 nt, Artificial Sequence
  Synthetic polynucleotide
cugcgcgugcucaacugcca

SEQ ID NO: 347 - RNA, 20 nt, Artificial Sequence
  Synthetic polynucleotide
ugcgcgugcucaacugccaa

SEQ ID NO: 348 - RNA, 20 nt, Artificial Sequence
  Synthetic polynucleotide
gcgcgugcucaacugccaag

SEQ ID NO: 349 - RNA, 20 nt, Artificial Sequence
  Synthetic polynucleotide
gcgugcucaacugccaaggg

SEQ ID NO: 350 - RNA, 20 nt, Artificial Sequence
  Synthetic polynucleotide
cgugcucaacugccaaggga

SEQ ID NO: 351 - RNA, 20 nt, Artificial Sequence
  Synthetic polynucleotide
gugcucaacugccaagggaa

SEQ ID NO: 352 - RNA, 20 nt, Artificial Sequence
  Synthetic polynucleotide
cucaacugccaagggaaggg

SEQ ID NO: 353 - RNA, 20 nt, Artificial Sequence
  Synthetic polynucleotide
gcggccaccagguugggggu

SEQ ID NO: 354 - RNA, 20 nt, Artificial Sequence
  Synthetic polynucleotide
cagggcggccaccagguugg

SEQ ID NO: 355 - RNA, 20 nt, Artificial Sequence
  Synthetic polynucleotide
gcagggcggccaccagguug

SEQ ID NO: 356 - RNA, 20 nt, Artificial Sequence
  Synthetic polynucleotide
ggcagggcggccaccagguu

SEQ ID NO: 357 - RNA, 20 nt, Artificial Sequence
  Synthetic polynucleotide
gggcagggcggccaccaggu

SEQ ID NO: 358 - RNA, 20 nt, Artificial Sequence
  Synthetic polynucleotide
uggggggcagggcggccacc

SEQ ID NO: 359 - RNA, 20 nt, Artificial Sequence
  Synthetic polynucleotide
cuggggggcagggcggccac

SEQ ID NO: 360 - RNA, 20 nt, Artificial Sequence
  Synthetic polynucleotide
gggcggccaccagguugggg

SEQ ID NO: 361 - RNA, 20 nt, Artificial Sequence
  Synthetic polynucleotide
ggcagggcggccaccagguu

SEQ ID NO: 362 - RNA, 20 nt, Artificial Sequence
  Synthetic polynucleotide
ggcagggcggccaccagguu

SEQ ID NO: 363 - RNA, 20 nt, Artificial Sequence
  Synthetic polynucleotide
gggcagggcggccaccaggu

SEQ ID NO: 364 - RNA, 20 nt, Artificial Sequence
  Synthetic polynucleotide
agcgcacugcccgccgccug

SEQ ID NO: 365 - RNA, 20 nt, Artificial Sequence
  Synthetic polynucleotide
gcgcacugcccgccgccugc

SEQ ID NO: 366 - RNA, 20 nt, Artificial Sequence
  Synthetic polynucleotide
gacggccuggccgaagcacc

SEQ ID NO: 367 - RNA, 20 nt, Artificial Sequence
  Synthetic polynucleotide
acggccuggccgaagcaccc

SEQ ID NO: 368 - RNA, 20 nt, Artificial Sequence
  Synthetic polynucleotide
cuggccgaagcacccgagca

SEQ ID NO: 369 - RNA, 20 nt, Artificial Sequence
  Synthetic polynucleotide
uggccgaagcacccgagcac

SEQ ID NO: 370 - RNA, 20 nt, Artificial Sequence
  Synthetic polynucleotide
gcgcagcgguggaagguggc

SEQ ID NO: 371 - RNA, 20 nt, Artificial Sequence
  Synthetic polynucleotide
cuuggcgcagcgguggaagg

SEQ ID NO: 372 - RNA, 20 nt, Artificial Sequence
  Synthetic polynucleotide
accuuggcgcagcgguggaa

SEQ ID NO: 373 - RNA, 20 nt, Artificial Sequence
  Synthetic polynucleotide
caccuuggcgcagcggugga

SEQ ID NO: 374 - RNA, 20 nt, Artificial Sequence
  Synthetic polynucleotide
gcaccuuggcgcagcggugg

SEQ ID NO: 375 - RNA, 20 nt, Artificial Sequence
  Synthetic polynucleotide
ccgcaccuuggcgcagcggu

SEQ ID NO: 376 - RNA, 20 nt, Artificial Sequence
  Synthetic polynucleotide
cccgcaccuuggcgcagcgg

SEQ ID NO: 377 - RNA, 20 nt, Artificial Sequence
  Synthetic polynucleotide
gcgcagcgguggaagguggc

SEQ ID NO: 378 - RNA, 20 nt, Artificial Sequence
  Synthetic polynucleotide
cgcaccuuggcgcagcggug

SEQ ID NO: 379 - RNA, 20 nt, Artificial Sequence
  Synthetic polynucleotide
caccuuggcgcagcggugga

SEQ ID NO: 380 - RNA, 20 nt, Artificial Sequence
  Synthetic polynucleotide
cgugcucgggugcuucggcc

SEQ ID NO: 381 - RNA, 20 nt, Artificial Sequence
  Synthetic polynucleotide
ccgugcucgggugcuucggc

SEQ ID NO: 382 - RNA, 20 nt, Artificial Sequence
  Synthetic polynucleotide
gguuccgugcucgggugcuu

SEQ ID NO: 383 - RNA, 20 nt, Artificial Sequence
  Synthetic polynucleotide
cgcuaaccgugcccuucccu

SEQ ID NO: 384 - RNA, 20 nt, Artificial Sequence
  Synthetic polynucleotide
ccuaugagggugccgcuaac

SEQ ID NO: 385 - RNA, 21 nt, Artificial Sequence
  Synthetic polynucleotide
cgcuaaccgugcccuucccuu

SEQ ID NO: 386 - RNA, 20 nt, Artificial Sequence
  Synthetic polynucleotide
cugcugcccacguggcuggu

SEQ ID NO: 387 - RNA, 20 nt, Artificial Sequence
  Synthetic polynucleotide
ggcugcugcccacguggcug

SEQ ID NO: 388 - RNA, 20 nt, Artificial Sequence
  Synthetic polynucleotide
caaccugcaaaaagggccug

SEQ ID NO: 389 - RNA, 20 nt, Artificial Sequence
  Synthetic polynucleotide
ccaaccugcaaaaagggccu

SEQ ID NO: 390 - RNA, 20 nt, Artificial Sequence
  Synthetic polynucleotide
gccaaccugcaaaaagggcc

SEQ ID NO: 391 - RNA, 20 nt, Artificial Sequence
  Synthetic polynucleotide
cagcugccaaccugcaaaaa

SEQ ID NO: 392 - RNA, 20 nt, Artificial Sequence
  Synthetic polynucleotide
acagcugccaaccugcaaaa

SEQ ID NO: 393 - RNA, 20 nt, Artificial Sequence
  Synthetic polynucleotide
aacagcugccaaccugcaaa

SEQ ID NO: 394 - RNA, 20 nt, Artificial Sequence
  Synthetic polynucleotide
gccaaccugcaaaaagggcc

SEQ ID NO: 395 - RNA, 21 nt, Artificial Sequence
  Synthetic polynucleotide
cguagacacccucacccccaa

SEQ ID NO: 396 - RNA, 20 nt, Artificial Sequence
  Synthetic polynucleotide
agcauggaaucccggccccu

SEQ ID NO: 397 - RNA, 20 nt, Artificial Sequence
  Synthetic polynucleotide
gcauggaaucccggccccuc

SEQ ID NO: 398 - RNA, 20 nt, Artificial Sequence
  Synthetic polynucleotide
cauggaaucccggccccuca

SEQ ID NO: 399 - RNA, 20 nt, Artificial Sequence
  Synthetic polynucleotide
auggaaucccggccccucag

SEQ ID NO: 400 - RNA, 20 nt, Artificial Sequence
  Synthetic polynucleotide
gaaucccggccccucaggag

SEQ ID NO: 401 - RNA, 20 nt, Artificial Sequence
  Synthetic polynucleotide
aaucccggccccucaggagc

SEQ ID NO: 402 - RNA, 20 nt, Artificial Sequence
  Synthetic polynucleotide
aucccggccccucaggagca

SEQ ID NO: 403 - RNA, 20 nt, Artificial Sequence
  Synthetic polynucleotide
cccggccccucaggagcagg

SEQ ID NO: 404 - RNA, 20 nt, Artificial Sequence
  Synthetic polynucleotide
ggaaucccggccccucagga

SEQ ID NO: 405 - RNA, 20 nt, Artificial Sequence
  Synthetic polynucleotide
gcauggaaucccggccccuc

SEQ ID NO: 406 - RNA, 20 nt, Artificial Sequence
  Synthetic polynucleotide
aaucccggccccucaggagc

SEQ ID NO: 407 - RNA, 20 nt, Artificial Sequence
  Synthetic polynucleotide
gcagcaccugcuuuguguca

SEQ ID NO: 408 - RNA, 20 nt, Artificial Sequence
  Synthetic polynucleotide
cagcaccugcuuugugucac

SEQ ID NO: 409 - RNA, 20 nt, Artificial Sequence
  Synthetic polynucleotide
agcaccugcuuugugucaca

SEQ ID NO: 410 - RNA, 20 nt, Artificial Sequence
  Synthetic polynucleotide
gcaccugcuuugugucacag

SEQ ID NO: 411 - RNA, 20 nt, Artificial Sequence
  Synthetic polynucleotide
accugcuuugugucacagag

SEQ ID NO: 412 - RNA, 20 nt, Artificial Sequence
  Synthetic polynucleotide
ccugcuuugugucacagagu

SEQ ID NO: 413 - RNA, 20 nt, Artificial Sequence
  Synthetic polynucleotide
gcagcaccugcuuuguguca

SEQ ID NO: 414 - RNA, 20 nt, Artificial Sequence
  Synthetic polynucleotide
gcccaugagggccaggggag

SEQ ID NO: 415 - RNA, 20 nt, Artificial Sequence
  Synthetic polynucleotide
ugcccaugagggccagggga

SEQ ID NO: 416 - RNA, 20 nt, Artificial Sequence
  Synthetic polynucleotide
gugcccaugagggccagggg

SEQ ID NO: 417 - RNA, 20 nt, Artificial Sequence
  Synthetic polynucleotide
ggugcccaugagggccaggg

SEQ ID NO: 418 - RNA, 20 nt, Artificial Sequence
  Synthetic polynucleotide
cggugcccaugagggccagg

SEQ ID NO: 419 - RNA, 20 nt, Artificial Sequence
  Synthetic polynucleotide
acggugcccaugagggccag

SEQ ID NO: 420 - RNA, 20 nt, Artificial Sequence
  Synthetic polynucleotide
gacggugcccaugagggcca

SEQ ID NO: 421 - RNA, 20 nt, Artificial Sequence
  Synthetic polynucleotide
ugacggugcccaugagggcc

SEQ ID NO: 422 - RNA, 20 nt, Artificial Sequence
  Synthetic polynucleotide
ugacggugcccaugagggcc

SEQ ID NO: 423 - RNA, 20 nt, Artificial Sequence
  Synthetic polynucleotide
cugacggugcccaugagggc

SEQ ID NO: 424 - RNA, 20 nt, Artificial Sequence
  Synthetic polynucleotide
gugcccaugagggccagggg

SEQ ID NO: 425 - RNA, 20 nt, Artificial Sequence
  Synthetic polynucleotide
acggugcccaugagggccag

SEQ ID NO: 426 - RNA, 20 nt, Artificial Sequence
  Synthetic polynucleotide
ugacggugcccaugagggcc

SEQ ID NO: 427 - RNA, 20 nt, Artificial Sequence
  Synthetic polynucleotide
cccaggagcagcagcagcag

SEQ ID NO: 428 - RNA, 20 nt, Artificial Sequence
  Synthetic polynucleotide
ggacccaggagcagcagcag

SEQ ID NO: 429 - RNA, 20 nt, Artificial Sequence
  Synthetic polynucleotide
gcgggacccaggagcagcag

SEQ ID NO: 430 - RNA, 20 nt, Artificial Sequence
  Synthetic polynucleotide
cccgcgggacccaggagcag

SEQ ID NO: 431 - RNA, 20 nt, Artificial Sequence
  Synthetic polynucleotide
gcgcccgcgggacccaggag

SEQ ID NO: 432 - RNA, 20 nt, Artificial Sequence
  Synthetic polynucleotide
ggcgcaggccucccaggagc

SEQ ID NO: 433 - RNA, 20 nt, Artificial Sequence
  Synthetic polynucleotide
gcgcccgcgggacccaggag

SEQ ID NO: 434 - RNA, 20 nt, Artificial Sequence
  Synthetic polynucleotide
cgggcgcccgcgggacccag

SEQ ID NO: 435 - RNA, 20 nt, Artificial Sequence
  Synthetic polynucleotide
acgggcgcccgcgggaccca

SEQ ID NO: 436 - RNA, 20 nt, Artificial Sequence
  Synthetic polynucleotide
cacgggcgcccgcgggaccc

SEQ ID NO: 437 - RNA, 20 nt, Artificial Sequence
  Synthetic polynucleotide
gcacgggcgcccgcgggacc

SEQ ID NO: 438 - RNA, 20 nt, Artificial Sequence
  Synthetic polynucleotide
cacgggcgcccgcgggaccc

SEQ ID NO: 439 - RNA, 20 nt, Artificial Sequence
  Synthetic polynucleotide
cccgcgggcgcccgugcgca

SEQ ID NO: 440 - RNA, 20 nt, Artificial Sequence
  Synthetic polynucleotide
ccgcgggcgcccgugcgcag

SEQ ID NO: 441 - RNA, 20 nt, Artificial Sequence
  Synthetic polynucleotide
cgcgggcgcccgugcgcagg

SEQ ID NO: 442 - RNA, 20 nt, Artificial Sequence
  Synthetic polynucleotide
gcgggcgcccgugcgcagga

SEQ ID NO: 443 - RNA, 20 nt, Artificial Sequence
  Synthetic polynucleotide
ggcgcccgugcgcaggagga

SEQ ID NO: 444 - RNA, 20 nt, Artificial Sequence
  Synthetic polynucleotide
gcgcccgugcgcaggaggac

SEQ ID NO: 445 - RNA, 20 nt, Artificial Sequence
  Synthetic polynucleotide
cgcccgugcgcaggaggacg

SEQ ID NO: 446 - RNA, 20 nt, Artificial Sequence
  Synthetic polynucleotide
gcccgugcgcaggaggacga

SEQ ID NO: 447 - RNA, 20 nt, Artificial Sequence
  Synthetic polynucleotide
cgugcgcaggaggacgagga

SEQ ID NO: 448 - RNA, 21 nt, Artificial Sequence
  Synthetic polynucleotide
cgugcgcaggaggacgaggac

SEQ ID NO: 449 - RNA, 20 nt, Artificial Sequence
  Synthetic polynucleotide
cgugcgcaggaggacgagga

SEQ ID NO: 450 - RNA, 20 nt, Artificial Sequence
  Synthetic polynucleotide
gccuugcguuccgaggagga

SEQ ID NO: 451 - RNA, 20 nt, Artificial Sequence
  Synthetic polynucleotide
gcguuccgaggaggacggcc

SEQ ID NO: 452 - RNA, 20 nt, Artificial Sequence
  Synthetic polynucleotide
uccgaggaggacggccuggc

SEQ ID NO: 453 - RNA, 20 nt, Artificial Sequence
  Synthetic polynucleotide
ccaccaggaccgccuggagc

SEQ ID NO: 454 - RNA, 20 nt, Artificial Sequence
  Synthetic polynucleotide
gcggccaccaggaccgccug

SEQ ID NO: 455 - RNA, 20 nt, Artificial Sequence
  Synthetic polynucleotide
agcggccaccaggaccgccu

SEQ ID NO: 456 - RNA, 20 nt, Artificial Sequence
  Synthetic polynucleotide
cagcggccaccaggaccgcc

SEQ ID NO: 457 - RNA, 20 nt, Artificial Sequence
  Synthetic polynucleotide
caccaggaccgccuggagcu

SEQ ID NO: 458 - RNA, 20 nt, Artificial Sequence
  Synthetic polynucleotide
cagcggccaccaggaccgcc

SEQ ID NO: 459 - RNA, 20 nt, Artificial Sequence
  Synthetic polynucleotide
cagcggccaccaggaccgcc

SEQ ID NO: 460 - RNA, 20 nt, Artificial Sequence
  Synthetic polynucleotide
agcaguggcagcggccacca

SEQ ID NO: 461 - RNA, 20 nt, Artificial Sequence
  Synthetic polynucleotide
cagcaguggcagcggccacc

SEQ ID NO: 462 - RNA, 20 nt, Artificial Sequence
  Synthetic polynucleotide
gcagcaguggcagcggccac

SEQ ID NO: 463 - RNA, 20 nt, Artificial Sequence
  Synthetic polynucleotide
ucggaacgcaaggcuagcac

SEQ ID NO: 464 - RNA, 22 nt, Artificial Sequence
  Synthetic polynucleotide
ggcaaggcuagcaccagcuccu

SEQ ID NO: 465 - RNA, 20 nt, Artificial Sequence
  Synthetic polynucleotide
uccuccucggaacgcaaggc

SEQ ID NO: 466 - RNA, 20 nt, Artificial Sequence
  Synthetic polynucleotide
gccguccuccucggaacgca

SEQ ID NO: 467 - RNA, 20 nt, Artificial Sequence
  Synthetic polynucleotide
ggccguccuccucggaacgc

SEQ ID NO: 468 - RNA, 20 nt, Artificial Sequence
  Synthetic polynucleotide
guggucagcggccgggaugc

SEQ ID NO: 469 - RNA, 20 nt, Artificial Sequence
  Synthetic polynucleotide
uggucagcggccgggaugcc

SEQ ID NO: 470 - RNA, 20 nt, Artificial Sequence
  Synthetic polynucleotide
gucagcggccgggaugccgg

SEQ ID NO: 471 - RNA, 20 nt, Artificial Sequence
  Synthetic polynucleotide
cagcggccgggaugccggcg

SEQ ID NO: 472 - RNA, 20 nt, Artificial Sequence
  Synthetic polynucleotide
gccgggaugccggcguggcc

SEQ ID NO: 473 - RNA, 20 nt, Artificial Sequence
  Synthetic polynucleotide
ccgggaugccggcguggcca

SEQ ID NO: 474 - RNA, 20 nt, Artificial Sequence
  Synthetic polynucleotide
cgggaugccggcguggccaa

SEQ ID NO: 475 - RNA, 21 nt, Artificial Sequence
  Synthetic polynucleotide
cgggaugccggcguggccaag

SEQ ID NO: 476 - RNA, 20 nt, Artificial Sequence
  Synthetic polynucleotide
gccgggaugccggcguggcc

SEQ ID NO: 477 - RNA, 20 nt, Artificial Sequence
  Synthetic polynucleotide
guggucagcggccgggaugc

SEQ ID NO: 478 - RNA, 20 nt, Artificial Sequence
  Synthetic polynucleotide
cgggaugccggcguggccaa

SEQ ID NO: 479 - RNA, 20 nt, Artificial Sequence
  Synthetic polynucleotide
cuuugcccagagcaucccgu

SEQ ID NO: 480 - RNA, 20 nt, Artificial Sequence
  Synthetic polynucleotide
ccagagcaucccguggaacc

SEQ ID NO: 481 - RNA, 20 nt, Artificial Sequence
  Synthetic polynucleotide
cagagcaucccguggaaccu

SEQ ID NO: 482 - RNA, 20 nt, Artificial Sequence
  Synthetic polynucleotide
agagcaucccguggaaccug

SEQ ID NO: 483 - RNA, 20 nt, Artificial Sequence
  Synthetic polynucleotide
gagcaucccguggaaccugg

SEQ ID NO: 484 - RNA, 20 nt, Artificial Sequence
  Synthetic polynucleotide
gcaucccguggaaccuggag

SEQ ID NO: 485 - RNA, 20 nt, Artificial Sequence
  Synthetic polynucleotide
agcaucccguggaaccugga

SEQ ID NO: 486 - RNA, 20 nt, Artificial Sequence
  Synthetic polynucleotide
ccagagcaucccguggaacc

SEQ ID NO: 487 - RNA, 20 nt, Artificial Sequence
  Synthetic polynucleotide
cgguggucacucuguaugcu

SEQ ID NO: 488 - RNA, 20 nt, Artificial Sequence
  Synthetic polynucleotide
ccgguggucacucuguaugc

SEQ ID NO: 489 - RNA, 20 nt, Artificial Sequence
  Synthetic polynucleotide
ucccgguggucacucuguau

SEQ ID NO: 490 - RNA, 20 nt, Artificial Sequence
  Synthetic polynucleotide
ccgguggucacucuguaugc

SEQ ID NO: 491 - RNA, 20 nt, Artificial Sequence
  Synthetic polynucleotide
cagagugaccaccgggaaau

SEQ ID NO: 492 - RNA, 20 nt, Artificial Sequence
  Synthetic polynucleotide
agagugaccaccgggaaauc

SEQ ID NO: 493 - RNA, 20 nt, Artificial Sequence
  Synthetic polynucleotide
gagugaccaccgggaaaucg

SEQ ID NO: 494 - RNA, 20 nt, Artificial Sequence
  Synthetic polynucleotide
agugaccaccgggaaaucga

SEQ ID NO: 495 - RNA, 20 nt, Artificial Sequence
  Synthetic polynucleotide
gaccaccgggaaaucgaggg

SEQ ID NO: 496 - RNA, 20 nt, Artificial Sequence
  Synthetic polynucleotide
accaccgggaaaucgagggc

SEQ ID NO: 497 - RNA, 20 nt, Artificial Sequence
  Synthetic polynucleotide
ccaccgggaaaucgagggca

SEQ ID NO: 498 - RNA, 20 nt, Artificial Sequence
  Synthetic polynucleotide
gaccaccgggaaaucgaggg

SEQ ID NO: 499 - RNA, 20 nt, Artificial Sequence
  Synthetic polynucleotide
cgggaaaucgagggcagggu

SEQ ID NO: 500 - RNA, 20 nt, Artificial Sequence
  Synthetic polynucleotide
ucgucgagcaggccagcaag

SEQ ID NO: 501 - RNA, 20 nt, Artificial Sequence
  Synthetic polynucleotide
gucgagcaggccagcaagug

SEQ ID NO: 502 - RNA, 20 nt, Artificial Sequence
  Synthetic polynucleotide
gagcaggccagcaaguguga

SEQ ID NO: 503 - RNA, 20 nt, Artificial Sequence
  Synthetic polynucleotide
gccagcaagugugacaguca

SEQ ID NO: 504 - RNA, 20 nt, Artificial Sequence
  Synthetic polynucleotide
ucgagcaggccagcaagugu

SEQ ID NO: 505 - RNA, 20 nt, Artificial Sequence
  Synthetic polynucleotide
ggccugcucgacgaacacaa

SEQ ID NO: 506 - RNA, 20 nt, Artificial Sequence
  Synthetic polynucleotide
uggccugcucgacgaacaca

SEQ ID NO: 507 - RNA, 20 nt, Artificial Sequence
  Synthetic polynucleotide
cuggccugcucgacgaacac

SEQ ID NO: 508 - RNA, 20 nt, Artificial Sequence
  Synthetic polynucleotide
acacuugcuggccugcucga

SEQ ID NO: 509 - RNA, 20 nt, Artificial Sequence
  Synthetic polynucleotide
cugccccuggcgggugggua

SEQ ID NO: 510 - RNA, 20 nt, Artificial Sequence
  Synthetic polynucleotide
cccuggcggguggguacagc

SEQ ID NO: 511 - RNA, 20 nt, Artificial Sequence
  Synthetic polynucleotide
ccaggggcagcagcaccacc

SEQ ID NO: 512 - RNA, 20 nt, Artificial Sequence
  Synthetic polynucleotide
gccaggggcagcagcaccac

SEQ ID NO: 513 - RNA, 20 nt, Artificial Sequence
  Synthetic polynucleotide
uacccacccgccaggggcag

SEQ ID NO: 514 - RNA, 20 nt, Artificial Sequence
  Synthetic polynucleotide
ccgccaggggcagcagcacc

SEQ ID NO: 515 - RNA, 20 nt, Artificial Sequence
  Synthetic polynucleotide
gcagucgcuggaggcaccaa

SEQ ID NO: 516 - RNA, 20 nt, Artificial Sequence
  Synthetic polynucleotide
cugcagucgcuggaggcacc

SEQ ID NO: 517 - RNA, 20 nt, Artificial Sequence
  Synthetic polynucleotide
gugcugcagucgcuggaggc

SEQ ID NO: 518 - RNA, 20 nt, Artificial Sequence
  Synthetic polynucleotide
gcagcaccugcuuuguguca

SEQ ID NO: 519 - RNA, 20 nt, Artificial Sequence
  Synthetic polynucleotide
cagcaccugcuuugugucac

SEQ ID NO: 520 - RNA, 20 nt, Artificial Sequence
  Synthetic polynucleotide
agcaccugcuuugugucaca

SEQ ID NO: 521 - RNA, 20 nt, Artificial Sequence
  Synthetic polynucleotide
gcaccugcuuugugucacag

SEQ ID NO: 522 - RNA, 20 nt, Artificial Sequence
  Synthetic polynucleotide
accugcuuugugucacagag

SEQ ID NO: 523 - RNA, 20 nt, Artificial Sequence
  Synthetic polynucleotide
ccugcuuugugucacagagu

SEQ ID NO: 524 - RNA, 21 nt, Artificial Sequence
  Synthetic polynucleotide
ccugcuuugugucacagagug

SEQ ID NO: 525 - RNA, 20 nt, Artificial Sequence
  Synthetic polynucleotide
gcagcaccugcuuuguguca

SEQ ID NO: 526 - RNA, 20 nt, Artificial Sequence
  Synthetic polynucleotide
gcaggugcugcagucgcugg

SEQ ID NO: 527 - RNA, 20 nt, Artificial Sequence
  Synthetic polynucleotide
agcaggugcugcagucgcug

SEQ ID NO: 528 - RNA, 20 nt, Artificial Sequence
  Synthetic polynucleotide
aagcaggugcugcagucgcu

SEQ ID NO: 529 - RNA, 20 nt, Artificial Sequence
  Synthetic polynucleotide
aaagcaggugcugcagucgc

SEQ ID NO: 530 - RNA, 20 nt, Artificial Sequence
  Synthetic polynucleotide
gugacacaaagcaggugcug

SEQ ID NO: 531 - RNA, 20 nt, Artificial Sequence
  Synthetic polynucleotide
aaagcaggugcugcagucgc

SEQ ID NO: 532 - RNA, 20 nt, Artificial Sequence
  Synthetic polynucleotide
acaucacaggcugcugccca

SEQ ID NO: 533 - RNA, 20 nt, Artificial Sequence
  Synthetic polynucleotide
aucacaggcugcugcccacg

SEQ ID NO: 534 - RNA, 20 nt, Artificial Sequence
  Synthetic polynucleotide
cacaggcugcugcccacgug

SEQ ID NO: 535 - RNA, 20 nt, Artificial Sequence
  Synthetic polynucleotide
cgcaggccucccaggagcuc

SEQ ID NO: 536 - RNA, 20 nt, Artificial Sequence
  Synthetic polynucleotide
gcaggccucccaggagcucc

SEQ ID NO: 537 - RNA, 20 nt, Artificial Sequence
  Synthetic polynucleotide
aggccucccaggagcuccag

SEQ ID NO: 538 - RNA, 20 nt, Artificial Sequence
  Synthetic polynucleotide
ccucccaggagcuccaguga

SEQ ID NO: 539 - RNA, 20 nt, Artificial Sequence
  Synthetic polynucleotide
ggcgcaggccucccaggagc

SEQ ID NO: 540 - RNA, 20 nt, Artificial Sequence
  Synthetic polynucleotide
cuaggagauacaccuccacc

SEQ ID NO: 541 - RNA, 20 nt, Artificial Sequence
  Synthetic polynucleotide
ucuaggagauacaccuccac

SEQ ID NO: 542 - RNA, 20 nt, Artificial Sequence
  Synthetic polynucleotide
ugacagucauggcacccacc

SEQ ID NO: 543 - RNA, 20 nt, Artificial Sequence
  Synthetic polynucleotide
cagucauggcacccaccugg

SEQ ID NO: 544 - RNA, 20 nt, Artificial Sequence
  Synthetic polynucleotide
agucauggcacccaccuggc

SEQ ID NO: 545 - RNA, 20 nt, Artificial Sequence
  Synthetic polynucleotide
gucauggcacccaccuggca

SEQ ID NO: 546 - RNA, 20 nt, Artificial Sequence
  Synthetic polynucleotide
ucauggcacccaccuggcag

SEQ ID NO: 547 - RNA, 20 nt, Artificial Sequence
  Synthetic polynucleotide
cauggcacccaccuggcagg

SEQ ID NO: 548 - RNA, 20 nt, Artificial Sequence
  Synthetic polynucleotide
agucauggcacccaccuggc

SEQ ID NO: 549 - RNA, 20 nt, Artificial Sequence
  Synthetic polynucleotide
cauggcacccaccuggcagg

SEQ ID NO: 550 - RNA, 20 nt, Artificial Sequence
  Synthetic polynucleotide
agucauggcacccaccuggc

SEQ ID NO: 551 - RNA, 20 nt, Artificial Sequence
  Synthetic polynucleotide
ucauggcacccaccuggcag

SEQ ID NO: 552 - RNA, 20 nt, Artificial Sequence
  Synthetic polynucleotide
cagagugaccaccgggaaau

SEQ ID NO: 553 - RNA, 20 nt, Artificial Sequence
  Synthetic polynucleotide
agagugaccaccgggaaauc

SEQ ID NO: 554 - RNA, 20 nt, Artificial Sequence
  Synthetic polynucleotide
gagugaccaccgggaaaucg

SEQ ID NO: 555 - RNA, 20 nt, Artificial Sequence
  Synthetic polynucleotide
agugaccaccgggaaaucga

SEQ ID NO: 556 - RNA, 20 nt, Artificial Sequence
  Synthetic polynucleotide
gaccaccgggaaaucgaggg

SEQ ID NO: 557 - RNA, 20 nt, Artificial Sequence
  Synthetic polynucleotide
accaccgggaaaucgagggc

SEQ ID NO: 558 - RNA, 20 nt, Artificial Sequence
  Synthetic polynucleotide
ccaccgggaaaucgagggca

SEQ ID NO: 559 - RNA, 20 nt, Artificial Sequence
  Synthetic polynucleotide
gaccaccgggaaaucgaggg

SEQ ID NO: 560 - RNA, 20 nt, Artificial Sequence
  Synthetic polynucleotide
auuggugccuccagcgacug

SEQ ID NO: 561 - RNA, 20 nt, Artificial Sequence
  Synthetic polynucleotide
gcagucgcuggaggcaccaa

SEQ ID NO: 562 - RNA, 20 nt, Artificial Sequence
  Synthetic polynucleotide
cugcagucgcuggaggcacc

SEQ ID NO: 563 - RNA, 20 nt, Artificial Sequence
  Synthetic polynucleotide
gugcugcagucgcuggaggc

SEQ ID NO: 564 - RNA, 20 nt, Artificial Sequence
  Synthetic polynucleotide
gcagucgcuggaggcaccaa

SEQ ID NO: 565 - RNA, 20 nt, Artificial Sequence
  Synthetic polynucleotide
gcaggugcugcagucgcugg

SEQ ID NO: 566 - RNA, 20 nt, Artificial Sequence
  Synthetic polynucleotide
agcaggugcugcagucgcug

SEQ ID NO: 567 - RNA, 20 nt, Artificial Sequence
  Synthetic polynucleotide
aagcaggugcugcagucgcu

SEQ ID NO: 568 - RNA, 20 nt, Artificial Sequence
  Synthetic polynucleotide
cugcagucgcuggaggcacc

SEQ ID NO: 569 - RNA, 20 nt, Artificial Sequence
  Synthetic polynucleotide
gugcugcagucgcuggaggc

SEQ ID NO: 570 - RNA, 20 nt, Artificial Sequence
  Synthetic polynucleotide
gcaggugcugcagucgcugg

SEQ ID NO: 571 - RNA, 20 nt, Artificial Sequence
  Synthetic polynucleotide
agcaggugcugcagucgcug

SEQ ID NO: 572 - RNA, 20 nt, Artificial Sequence
  Synthetic polynucleotide
aagcaggugcugcagucgcu

SEQ ID NO: 573 - RNA, 20 nt, Artificial Sequence
  Synthetic polynucleotide
aaagcaggugcugcagucgc

SEQ ID NO: 574 - RNA, 20 nt, Artificial Sequence
  Synthetic polynucleotide
cugcagucgcuggaggcacc

SEQ ID NO: 575 - RNA, 20 nt, Artificial Sequence
  Synthetic polynucleotide
gugcugcagucgcuggaggc

SEQ ID NO: 576 - RNA, 20 nt, Artificial Sequence
  Synthetic polynucleotide
aaagcaggugcugcagucgc

SEQ ID NO: 577 - RNA, 21 nt, Artificial Sequence
  Synthetic polynucleotide
caucacaggcugcugcccacg

SEQ ID NO: 578 - RNA, 20 nt, Artificial Sequence
  Synthetic polynucleotide
acaucacaggcugcugccca

SEQ ID NO: 579 - RNA, 20 nt, Artificial Sequence
  Synthetic polynucleotide
uccugggucccgcgggcgcc

SEQ ID NO: 580 - RNA, 20 nt, Artificial Sequence
  Synthetic polynucleotide
cugggucccgcgggcgcccg

SEQ ID NO: 581 - RNA, 20 nt, Artificial Sequence
  Synthetic polynucleotide
gucccgcgggcgcccgugcg

SEQ ID NO: 582 - RNA, 20 nt, Artificial Sequence
  Synthetic polynucleotide
ucccgcgggcgcccgugcgc

SEQ ID NO: 583 - RNA, 20 nt, Artificial Sequence
  Synthetic polynucleotide
cccgcgggcgcccgugcgca

SEQ ID NO: 584 - RNA, 20 nt, Artificial Sequence
  Synthetic polynucleotide
ccgcgggcgcccgugcgcag

SEQ ID NO: 585 - RNA, 20 nt, Artificial Sequence
  Synthetic polynucleotide
ucccgcgggcgcccgugcgc

SEQ ID NO: 586 - RNA, 20 nt, Artificial Sequence
  Synthetic polynucleotide
cuggccgaagcacccgagca

SEQ ID NO: 587 - RNA, 20 nt, Artificial Sequence
  Synthetic polynucleotide
uggccgaagcacccgagcac

SEQ ID NO: 588 - RNA, 20 nt, Artificial Sequence
  Synthetic polynucleotide
agcacccgagcacggaacca

SEQ ID NO: 589 - RNA, 20 nt, Artificial Sequence
  Synthetic polynucleotide
gcagcgguggaagguggcug

SEQ ID NO: 590 - RNA, 20 nt, Artificial Sequence
  Synthetic polynucleotide
gcgcagcgguggaagguggc

SEQ ID NO: 591 - RNA, 20 nt, Artificial Sequence
  Synthetic polynucleotide
cuuggcgcagcgguggaagg

SEQ ID NO: 592 - RNA, 20 nt, Artificial Sequence
  Synthetic polynucleotide
accuuggcgcagcgguggaa

SEQ ID NO: 593 - RNA, 20 nt, Artificial Sequence
  Synthetic polynucleotide
caccuuggcgcagcggugga

SEQ ID NO: 594 - RNA, 20 nt, Artificial Sequence
  Synthetic polynucleotide
gcgcagcgguggaagguggc

SEQ ID NO: 595 - RNA, 20 nt, Artificial Sequence
  Synthetic polynucleotide
caccuuggcgcagcggugga

SEQ ID NO: 596 - RNA, 20 nt, Artificial Sequence
  Synthetic polynucleotide
caggauccguggagguugcc

SEQ ID NO: 597 - RNA, 20 nt, Artificial Sequence
  Synthetic polynucleotide
uggagguugccuggcaccua

SEQ ID NO: 598 - RNA, 20 nt, Artificial Sequence
  Synthetic polynucleotide
gagguugccuggcaccuacg

SEQ ID NO: 599 - RNA, 20 nt, Artificial Sequence
  Synthetic polynucleotide
agguugccuggcaccuacgu

SEQ ID NO: 600 - RNA, 20 nt, Artificial Sequence
  Synthetic polynucleotide
guugccuggcaccuacgugg

SEQ ID NO: 601 - RNA, 20 nt, Artificial Sequence
  Synthetic polynucleotide
uugccuggcaccuacguggu

SEQ ID NO: 602 - RNA, 20 nt, Artificial Sequence
  Synthetic polynucleotide
uggagguugccuggcaccua

SEQ ID NO: 603 - RNA, 20 nt, Artificial Sequence
  Synthetic polynucleotide
agguugccuggcaccuacgu

SEQ ID NO: 604 - RNA, 20 nt, Artificial Sequence
  Synthetic polynucleotide
gagguugccuggcaccuacg

SEQ ID NO: 605 - RNA, 20 nt, Artificial Sequence
  Synthetic polynucleotide
guugccuggcaccuacgugg

SEQ ID NO: 606 - RNA, 20 nt, Artificial Sequence
  Synthetic polynucleotide
gucuuccauggccuucuucc

SEQ ID NO: 607 - RNA, 20 nt, Artificial Sequence
  Synthetic polynucleotide
ggccuucuuccuggcuuccu

SEQ ID NO: 608 - RNA, 20 nt, Artificial Sequence
  Synthetic polynucleotide
uggccuucuuccuggcuucc

SEQ ID NO: 609 - RNA, 20 nt, Artificial Sequence
  Synthetic polynucleotide
ccuucuuccuggcuuccugg

SEQ ID NO: 610 - RNA, 20 nt, Artificial Sequence
  Synthetic polynucleotide
cauggccuucuuccuggcuu

SEQ ID NO: 611 - RNA, 20 nt, Artificial Sequence
  Synthetic polynucleotide
cuucuuccuggcuuccuggu

SEQ ID NO: 612 - RNA, 20 nt, Artificial Sequence
  Synthetic polynucleotide
uggccuucuuccuggcuucc

SEQ ID NO: 613 - RNA, 20 nt, Artificial Sequence
  Synthetic polynucleotide
gccuugaaguugccccaugu

SEQ ID NO: 614 - RNA, 20 nt, Artificial Sequence
  Synthetic polynucleotide
uugccccaugucgacuacau

SEQ ID NO: 615 - RNA, 20 nt, Artificial Sequence
  Synthetic polynucleotide
ugccccaugucgacuacauc

SEQ ID NO: 616 - RNA, 20 nt, Artificial Sequence
  Synthetic polynucleotide
gccccaugucgacuacaucg

SEQ ID NO: 617 - RNA, 20 nt, Artificial Sequence
  Synthetic polynucleotide
ccccaugucgacuacaucga

SEQ ID NO: 618 - RNA, 20 nt, Artificial Sequence
  Synthetic polynucleotide
cccaugucgacuacaucgag

SEQ ID NO: 619 - RNA, 20 nt, Artificial Sequence
  Synthetic polynucleotide
gccccaugucgacuacaucg

SEQ ID NO: 620 - RNA, 20 nt, Artificial Sequence
  Synthetic polynucleotide
ccagagcaucccguggaacc

SEQ ID NO: 621 - RNA, 20 nt, Artificial Sequence
  Synthetic polynucleotide
cagagcaucccguggaaccu

SEQ ID NO: 622 - RNA, 20 nt, Artificial Sequence
  Synthetic polynucleotide
agagcaucccguggaaccug

SEQ ID NO: 623 - RNA, 20 nt, Artificial Sequence
  Synthetic polynucleotide
gagcaucccguggaaccugg

SEQ ID NO: 624 - RNA, 20 nt, Artificial Sequence
  Synthetic polynucleotide
gcaucccguggaaccuggag

SEQ ID NO: 625 - RNA, 20 nt, Artificial Sequence
  Synthetic polynucleotide
caucccguggaaccuggagc

SEQ ID NO: 626 - RNA, 20 nt, Artificial Sequence
  Synthetic polynucleotide
agcaucccguggaaccugga

SEQ ID NO: 627 - RNA, 20 nt, Artificial Sequence
  Synthetic polynucleotide
ccagagcaucccguggaacc

SEQ ID NO: 628 - RNA, 20 nt, Artificial Sequence
  Synthetic polynucleotide
ggauuaccccuccacgguac

SEQ ID NO: 629 - RNA, 20 nt, Artificial Sequence
  Synthetic polynucleotide
gauuaccccuccacgguacc

SEQ ID NO: 630 - RNA, 20 nt, Artificial Sequence
  Synthetic polynucleotide
auuaccccuccacgguaccg

SEQ ID NO: 631 - RNA, 20 nt, Artificial Sequence
  Synthetic polynucleotide
uaccccuccacgguaccggg

SEQ ID NO: 632 - RNA, 20 nt, Artificial Sequence
  Synthetic polynucleotide
accccuccacgguaccgggc

SEQ ID NO: 633 - RNA, 20 nt, Artificial Sequence
  Synthetic polynucleotide
ccuccacgguaccgggcgga

SEQ ID NO: 634 - RNA, 20 nt, Artificial Sequence
  Synthetic polynucleotide
uuaccccuccacgguaccgg

SEQ ID NO: 635 - RNA, 20 nt, Artificial Sequence
  Synthetic polynucleotide
cccuccacgguaccgggcgg

SEQ ID NO: 636 - RNA, 20 nt, Artificial Sequence
  Synthetic polynucleotide
gauuaccccuccacgguacc

SEQ ID NO: 637 - RNA, 20 nt, Artificial Sequence
  Synthetic polynucleotide
ugaauaccagccccccggua

SEQ ID NO: 638 - RNA, 21 nt, Artificial Sequence
  Synthetic polynucleotide
ccccccgguaagacccccauc

SEQ ID NO: 639 - RNA, 20 nt, Artificial Sequence
  Synthetic polynucleotide
cugccuccgucuuuccaagg

SEQ ID NO: 640 - RNA, 20 nt, Artificial Sequence
  Synthetic polynucleotide
ggcugccuccgucuuuccaa

SEQ ID NO: 641 - RNA, 20 nt, Artificial Sequence
  Synthetic polynucleotide
aggcugccuccgucuuucca

SEQ ID NO: 642 - RNA, 20 nt, Artificial Sequence
  Synthetic polynucleotide
aggcugccuccgucuuucca

SEQ ID NO: 643 - RNA, 20 nt, Artificial Sequence
  Synthetic polynucleotide
uucgagaaugugcccgagga

SEQ ID NO: 644 - RNA, 20 nt, Artificial Sequence
  Synthetic polynucleotide
gagaaugugcccgaggagga

SEQ ID NO: 645 - RNA, 20 nt, Artificial Sequence
  Synthetic polynucleotide
agaaugugcccgaggaggac

SEQ ID NO: 646 - RNA, 20 nt, Artificial Sequence
  Synthetic polynucleotide
gaaugugcccgaggaggacg

SEQ ID NO: 647 - RNA, 20 nt, Artificial Sequence
  Synthetic polynucleotide
gaagcgggucccguccuccu

SEQ ID NO: 648 - RNA, 20 nt, Artificial Sequence
  Synthetic polynucleotide
aagcgggucccguccuccuc

SEQ ID NO: 649 - RNA, 20 nt, Artificial Sequence
  Synthetic polynucleotide
gaagcgggucccguccuccu

SEQ ID NO: 650 - RNA, 20 nt, Artificial Sequence
  Synthetic polynucleotide
acacuugcuggccugcucga

SEQ ID NO: 651 - RNA, 20 nt, Artificial Sequence
  Synthetic polynucleotide
gucacacuugcuggccugcu

SEQ ID NO: 652 - RNA, 20 nt, Artificial Sequence
  Synthetic polynucleotide
ccccugccaggugggugcca

SEQ ID NO: 653 - RNA, 20 nt, Artificial Sequence
  Synthetic polynucleotide
cugaccaccccugccaggug

SEQ ID NO: 654 - RNA, 20 nt, Artificial Sequence
  Synthetic polynucleotide
cgcugaccaccccugccagg

SEQ ID NO: 655 - RNA, 20 nt, Artificial Sequence
  Synthetic polynucleotide
gcugaccaccccugccaggu

SEQ ID NO: 656 - RNA, 20 nt, Artificial Sequence
  Synthetic polynucleotide
cgcugaccaccccugccagg

SEQ ID NO: 657 - RNA, 20 nt, Artificial Sequence
  Synthetic polynucleotide
gccgcugaccaccccugcca

SEQ ID NO: 658 - RNA, 20 nt, Artificial Sequence
  Synthetic polynucleotide
ccgcugaccaccccugccag

SEQ ID NO: 659 - RNA, 20 nt, Artificial Sequence
  Synthetic polynucleotide
gcugaccaccccugccaggu

SEQ ID NO: 660 - RNA, 20 nt, Artificial Sequence
  Synthetic polynucleotide
gcaguugagcacgcgcaggc

SEQ ID NO: 661 - RNA, 20 nt, Artificial Sequence
  Synthetic polynucleotide
cuuggcaguugagcacgcgc

SEQ ID NO: 662 - RNA, 20 nt, Artificial Sequence
  Synthetic polynucleotide
ccuuggcaguugagcacgcg

SEQ ID NO: 663 - RNA, 20 nt, Artificial Sequence
  Synthetic polynucleotide
cuucccuuggcaguugagca

SEQ ID NO: 664 - RNA, 20 nt, Artificial Sequence
  Synthetic polynucleotide
ccuuggcaguugagcacgcg

SEQ ID NO: 665 - RNA, 20 nt, Artificial Sequence
  Synthetic polynucleotide
cuucccuuggcaguugagca

SEQ ID NO: 666 - RNA, 20 nt, Artificial Sequence
  Synthetic polynucleotide
gugcccuucccuuggcaguu

SEQ ID NO: 667 - RNA, 20 nt, Artificial Sequence
  Synthetic polynucleotide
gguccagccuguggggccac

SEQ ID NO: 668 - RNA, 20 nt, Artificial Sequence
  Synthetic polynucleotide
guccagccuguggggccacu

SEQ ID NO: 669 - RNA, 20 nt, Artificial Sequence
  Synthetic polynucleotide
ccagccuguggggccacugg

SEQ ID NO: 670 - RNA, 20 nt, Artificial Sequence
  Synthetic polynucleotide
cagccuguggggccacuggu

SEQ ID NO: 671 - RNA, 20 nt, Artificial Sequence
  Synthetic polynucleotide
guccagccuguggggccacu

SEQ ID NO: 672 - RNA, 20 nt, Artificial Sequence
  Synthetic polynucleotide
cugguccagccuguggggcc

SEQ ID NO: 673 - RNA, 20 nt, Artificial Sequence
  Synthetic polynucleotide
gguccagccuguggggccac

SEQ ID NO: 674 - RNA, 20 nt, Artificial Sequence
  Synthetic polynucleotide
ccagccuguggggccacugg

SEQ ID NO: 675 - RNA, 20 nt, Artificial Sequence
  Synthetic polynucleotide
gccccacaggcuggaccagc

SEQ ID NO: 676 - RNA, 20 nt, Artificial Sequence
  Synthetic polynucleotide
aguggccccacaggcuggac

SEQ ID NO: 677 - RNA, 20 nt, Artificial Sequence
  Synthetic polynucleotide
caccaguggccccacaggcu

SEQ ID NO: 678 - RNA, 22 nt, Artificial Sequence
  Synthetic polynucleotide
ccacugguggugcugcugcccc

SEQ ID NO: 679 - RNA, 20 nt, Artificial Sequence
  Synthetic polynucleotide
uggugcugcugccccuggcg

SEQ ID NO: 680 - RNA, 20 nt, Artificial Sequence
  Synthetic polynucleotide
gugcugcugccccuggcggg

SEQ ID NO: 681 - RNA, 20 nt, Artificial Sequence
  Synthetic polynucleotide
ugcugcugccccuggcgggu

SEQ ID NO: 682 - RNA, 20 nt, Artificial Sequence
  Synthetic polynucleotide
cugccccuggcgggugggua

SEQ ID NO: 683 - RNA, 21 nt, Artificial Sequence
  Synthetic polynucleotide
ccccuggcggguggguacagc

SEQ ID NO: 684 - RNA, 20 nt, Artificial Sequence
  Synthetic polynucleotide
ggugcugcugccccuggcgg

SEQ ID NO: 685 - RNA, 20 nt, Artificial Sequence
  Synthetic polynucleotide
guggugcugcugccccuggc

SEQ ID NO: 686 - RNA, 20 nt, Artificial Sequence
  Synthetic polynucleotide
uacccacccgccaggggcag

SEQ ID NO: 687 - RNA, 20 nt, Artificial Sequence
  Synthetic polynucleotide
cuguacccacccgccagggg

SEQ ID NO: 688 - RNA, 20 nt, Artificial Sequence
  Synthetic polynucleotide
gcggcuguacccacccgcca

SEQ ID NO: 689 - RNA, 20 nt, Artificial Sequence
  Synthetic polynucleotide
cggcuguacccacccgccag

SEQ ID NO: 690 - RNA, 20 nt, Artificial Sequence
  Synthetic polynucleotide
cgcggcuguacccacccgcc

SEQ ID NO: 691 - RNA, 20 nt, Artificial Sequence
  Synthetic polynucleotide
gcggcuguacccacccgcca

SEQ ID NO: 692 - RNA, 20 nt, Artificial Sequence
  Synthetic polynucleotide
cgcggcuguacccacccgcc

SEQ ID NO: 693 - RNA, 20 nt, Artificial Sequence
  Synthetic polynucleotide
cgcggcuguacccacccgcc

SEQ ID NO: 694 - RNA, 20 nt, Artificial Sequence
  Synthetic polynucleotide
ggcgcuggcaggcggcguug

SEQ ID NO: 695 - RNA, 20 nt, Artificial Sequence
  Synthetic polynucleotide
ggcaggcggcguugaggacg

SEQ ID NO: 696 - RNA, 20 nt, Artificial Sequence
  Synthetic polynucleotide
cuggcaggcggcguugagga

SEQ ID NO: 697 - RNA, 20 nt, Artificial Sequence
  Synthetic polynucleotide
gcgcuggcaggcggcguuga

SEQ ID NO: 698 - RNA, 20 nt, Artificial Sequence
  Synthetic polynucleotide
aggcgcuggcaggcggcguu

SEQ ID NO: 699 - RNA, 20 nt, Artificial Sequence
  Synthetic polynucleotide
caggcgcuggcaggcggcgu

SEQ ID NO: 700 - RNA, 20 nt, Artificial Sequence
  Synthetic polynucleotide
ggcaucgucccggaaguugc

SEQ ID NO: 701 - RNA, 20 nt, Artificial Sequence
  Synthetic polynucleotide
agaggcaggcaucgucccgg

SEQ ID NO: 702 - RNA, 20 nt, Artificial Sequence
  Synthetic polynucleotide
guagaggcaggcaucguccc

SEQ ID NO: 703 - RNA, 20 nt, Artificial Sequence
  Synthetic polynucleotide
aguagaggcaggcaucgucc

SEQ ID NO: 704 - RNA, 20 nt, Artificial Sequence
  Synthetic polynucleotide
guagaggcaggcaucguccc

SEQ ID NO: 705 - RNA, 20 nt, Artificial Sequence
  Synthetic polynucleotide
uacuccccagccucagcucc

SEQ ID NO: 706 - RNA, 20 nt, Artificial Sequence
  Synthetic polynucleotide
acuccccagccucagcuccc

SEQ ID NO: 707 - RNA, 20 nt, Artificial Sequence
  Synthetic polynucleotide
cuccccagccucagcucccg

SEQ ID NO: 708 - RNA, 20 nt, Artificial Sequence
  Synthetic polynucleotide
cccagccucagcucccgagg

SEQ ID NO: 709 - RNA, 20 nt, Artificial Sequence
  Synthetic polynucleotide
ccagccucagcucccgaggu

SEQ ID NO: 710 - RNA, 21 nt, Artificial Sequence
  Synthetic polynucleotide
ccagccucagcucccgaggua

SEQ ID NO: 711 - RNA, 20 nt, Artificial Sequence
  Synthetic polynucleotide
uacuccccagccucagcucc

SEQ ID NO: 712 - RNA, 20 nt, Artificial Sequence
  Synthetic polynucleotide
ccccagccucagcucccgag

SEQ ID NO: 713 - RNA, 20 nt, Artificial Sequence
  Synthetic polynucleotide
ccagccucagcucccgaggu

SEQ ID NO: 714 - RNA, 20 nt, Artificial Sequence
  Synthetic polynucleotide
cagccucagcucccgaggua

SEQ ID NO: 715 - RNA, 20 nt, Artificial Sequence
  Synthetic polynucleotide
ucagcucccgagguaggugc

SEQ ID NO: 716 - RNA, 20 nt, Artificial Sequence
  Synthetic polynucleotide
cagcucccgagguaggugcu

SEQ ID NO: 717 - RNA, 20 nt, Artificial Sequence
  Synthetic polynucleotide
agcucccgagguaggugcug

SEQ ID NO: 718 - RNA, 20 nt, Artificial Sequence
  Synthetic polynucleotide
ucagcucccgagguaggugc

SEQ ID NO: 719 - RNA, 20 nt, Artificial Sequence
  Synthetic polynucleotide
ccaacugugaugaccuggaa

SEQ ID NO: 720 - RNA, 21 nt, Artificial Sequence
  Synthetic polynucleotide
ccaacugugaugaccuggaaa

SEQ ID NO: 721 - RNA, 20 nt, Artificial Sequence
  Synthetic polynucleotide
cccaacugugaugaccugga

SEQ ID NO: 722 - RNA, 20 nt, Artificial Sequence
  Synthetic polynucleotide
ggccccaacugugaugaccu

SEQ ID NO: 723 - RNA, 20 nt, Artificial Sequence
  Synthetic polynucleotide
uggccccaacugugaugacc

SEQ ID NO: 724 - RNA, 20 nt, Artificial Sequence
  Synthetic polynucleotide
auugguggccccaacuguga

SEQ ID NO: 725 - RNA, 20 nt, Artificial Sequence
  Synthetic polynucleotide
ccccaacugugaugaccugg

SEQ ID NO: 726 - RNA, 20 nt, Artificial Sequence
  Synthetic polynucleotide
ccaacugugaugaccuggaa

SEQ ID NO: 727 - RNA, 20 nt, Artificial Sequence
  Synthetic polynucleotide
ccaagaccagccggugaccc

SEQ ID NO: 728 - RNA, 20 nt, Artificial Sequence
  Synthetic polynucleotide
caagaccagccggugacccu

SEQ ID NO: 729 - RNA, 20 nt, Artificial Sequence
  Synthetic polynucleotide
aagaccagccggugacccug

SEQ ID NO: 730 - RNA, 20 nt, Artificial Sequence
  Synthetic polynucleotide
agaccagccggugacccugg

SEQ ID NO: 731 - RNA, 20 nt, Artificial Sequence
  Synthetic polynucleotide
gccggugacccuggggacuu

SEQ ID NO: 732 - RNA, 20 nt, Artificial Sequence
  Synthetic polynucleotide
ccggugacccuggggacuuu

SEQ ID NO: 733 - RNA, 20 nt, Artificial Sequence
  Synthetic polynucleotide
cggugacccuggggacuuug

SEQ ID NO: 734 - RNA, 40 nt, Artificial Sequence
  Synthetic polynucleotide
ccaagaccagccggugacccgccggugacccuggggacuu

SEQ ID NO: 735 - RNA, 20 nt, Artificial Sequence
  Synthetic polynucleotide
guccacacagcggccaaagu

SEQ ID NO: 736 - RNA, 20 nt, Artificial Sequence
  Synthetic polynucleotide
agagguccacacagcggcca

SEQ ID NO: 737 - RNA, 20 nt, Artificial Sequence
  Synthetic polynucleotide
cagcggccaaaguugguccc

SEQ ID NO: 738 - RNA, 20 nt, Artificial Sequence
  Synthetic polynucleotide
agguccacacagcggccaaa

SEQ ID NO: 739 - RNA, 20 nt, Artificial Sequence
  Synthetic polynucleotide
gaccucuuugccccagggga

SEQ ID NO: 740 - RNA, 20 nt, Artificial Sequence
  Synthetic polynucleotide
gccccaggggaggacaucau

SEQ ID NO: 741 - RNA, 20 nt, Artificial Sequence
  Synthetic polynucleotide
ccccaggggaggacaucauu

SEQ ID NO: 742 - RNA, 20 nt, Artificial Sequence
  Synthetic polynucleotide
uugccccaggggaggacauc

SEQ ID NO: 743 - RNA, 20 nt, Artificial Sequence
  Synthetic polynucleotide
gccccaggggaggacaucau

SEQ ID NO: 744 - RNA, 20 nt, Artificial Sequence
  Synthetic polynucleotide
ccuggggcaaagagguccac

SEQ ID NO: 745 - RNA, 20 nt, Artificial Sequence
  Synthetic polynucleotide
uguccuccccuggggcaaag

SEQ ID NO: 746 - RNA, 20 nt, Artificial Sequence
  Synthetic polynucleotide
auguccuccccuggggcaaa

SEQ ID NO: 747 - RNA, 20 nt, Artificial Sequence
  Synthetic polynucleotide
gauguccuccccuggggcaa

SEQ ID NO: 748 - RNA, 20 nt, Artificial Sequence
  Synthetic polynucleotide
gauguccuccccuggggcaa

SEQ ID NO: 749 - RNA, 20 nt, Artificial Sequence
  Synthetic polynucleotide
ccacucugugacacaaagca

SEQ ID NO: 750 - RNA, 20 nt, Artificial Sequence
  Synthetic polynucleotide
cccacucugugacacaaagc

SEQ ID NO: 751 - RNA, 20 nt, Artificial Sequence
  Synthetic polynucleotide
ucccacucugugacacaaag

SEQ ID NO: 752 - RNA, 20 nt, Artificial Sequence
  Synthetic polynucleotide
augucccacucugugacaca

SEQ ID NO: 753 - RNA, 20 nt, Artificial Sequence
  Synthetic polynucleotide
gccugugaugucccacucug

SEQ ID NO: 754 - RNA, 20 nt, Artificial Sequence
  Synthetic polynucleotide
cccacucugugacacaaagc

SEQ ID NO: 755 - RNA, 20 nt, Artificial Sequence
  Synthetic polynucleotide
ugccgagccggagcucaccc

SEQ ID NO: 756 - RNA, 20 nt, Artificial Sequence
  Synthetic polynucleotide
gagccggagcucacccuggc

SEQ ID NO: 757 - RNA, 20 nt, Artificial Sequence
  Synthetic polynucleotide
agccggagcucacccuggcc

SEQ ID NO: 758 - RNA, 20 nt, Artificial Sequence
  Synthetic polynucleotide
cgagccggagcucacccugg

SEQ ID NO: 759 - RNA, 20 nt, Artificial Sequence
  Synthetic polynucleotide
aggccugguucccugaggac

SEQ ID NO: 760 - RNA, 20 nt, Artificial Sequence
  Synthetic polynucleotide
ggccugguucccugaggacc

SEQ ID NO: 761 - RNA, 20 nt, Artificial Sequence
  Synthetic polynucleotide
ccugguucccugaggaccag

SEQ ID NO: 762 - RNA, 20 nt, Artificial Sequence
  Synthetic polynucleotide
cugguucccugaggaccagc

SEQ ID NO: 763 - RNA, 20 nt, Artificial Sequence
  Synthetic polynucleotide
cccugaggaccagcggguac

SEQ ID NO: 764 - RNA, 20 nt, Artificial Sequence
  Synthetic polynucleotide
gccugguucccugaggacca

SEQ ID NO: 765 - RNA, 20 nt, Artificial Sequence
  Synthetic polynucleotide
ccugccccccagcacccaug

SEQ ID NO: 766 - RNA, 20 nt, Artificial Sequence
  Synthetic polynucleotide
cccugccccccagcacccau

SEQ ID NO: 767 - RNA, 20 nt, Artificial Sequence
  Synthetic polynucleotide
gcggguacugacccccaacc

SEQ ID NO: 768 - RNA, 20 nt, Artificial Sequence
  Synthetic polynucleotide
cggguacugacccccaaccu

SEQ ID NO: 769 - RNA, 20 nt, Artificial Sequence
  Synthetic polynucleotide
ccugccccccagcacccaug

SEQ ID NO: 770 - RNA, 20 nt, Artificial Sequence
  Synthetic polynucleotide
cccugccccccagcacccau

SEQ ID NO: 771 - RNA, 20 nt, Artificial Sequence
  Synthetic polynucleotide
gcccugccccccagcaccca

SEQ ID NO: 772 - RNA, 20 nt, Artificial Sequence
  Synthetic polynucleotide
gccccccagcacccaugggg

SEQ ID NO: 773 - RNA, 20 nt, Artificial Sequence
  Synthetic polynucleotide
ccccccagcacccauggggc

SEQ ID NO: 774 - RNA, 20 nt, Artificial Sequence
  Synthetic polynucleotide
ugccccccagcacccauggg

SEQ ID NO: 775 - RNA, 20 nt, Artificial Sequence
  Synthetic polynucleotide
gcccugccccccagcaccca

SEQ ID NO: 776 - RNA, 21 nt, Artificial Sequence
  Synthetic polynucleotide
cccagcacccauggggcaggu

SEQ ID NO: 777 - RNA, 20 nt, Artificial Sequence
  Synthetic polynucleotide
ccaugggugcuggggggcag

SEQ ID NO: 778 - RNA, 20 nt, Artificial Sequence
  Synthetic polynucleotide
ccccaugggugcuggggggc

SEQ ID NO: 779 - RNA, 20 nt, Artificial Sequence
  Synthetic polynucleotide
cccaugggugcuggggggca

SEQ ID NO: 780 - RNA, 20 nt, Artificial Sequence
  Synthetic polynucleotide
ccccaugggugcuggggggc

SEQ ID NO: 781 - RNA, 20 nt, Artificial Sequence
  Synthetic polynucleotide
gccccaugggugcugggggg

SEQ ID NO: 782 - RNA, 20 nt, Artificial Sequence
  Synthetic polynucleotide
accugccccaugggugcugg

SEQ ID NO: 783 - RNA, 20 nt, Artificial Sequence
  Synthetic polynucleotide
ccugccccaugggugcuggg

SEQ ID NO: 784 - RNA, 20 nt, Artificial Sequence
  Synthetic polynucleotide
uaccugccccaugggugcug

SEQ ID NO: 785 - RNA, 20 nt, Artificial Sequence
  Synthetic polynucleotide
accugccccaugggugcugg

SEQ ID NO: 786 - RNA, 20 nt, Artificial Sequence
  Synthetic polynucleotide
uuaccugccccaugggugcu

SEQ ID NO: 787 - RNA, 20 nt, Artificial Sequence
  Synthetic polynucleotide
uaccugccccaugggugcug

SEQ ID NO: 788 - RNA, 20 nt, Artificial Sequence
  Synthetic polynucleotide
uuaccugccccaugggugcu

SEQ ID NO: 789 - RNA, 20 nt, Artificial Sequence
  Synthetic polynucleotide
cuuaccugccccaugggugc

SEQ ID NO: 790 - RNA, 20 nt, Artificial Sequence
  Synthetic polynucleotide
cuuaccugccccaugggugc

SEQ ID NO: 791 - RNA, 20 nt, Artificial Sequence
  Synthetic polynucleotide
cccaugggugcuggggggca

SEQ ID NO: 792 - RNA, 20 nt, Artificial Sequence
  Synthetic polynucleotide
uaccugccccaugggugcug

SEQ ID NO: 793 - RNA, 20 nt, Artificial Sequence
  Synthetic polynucleotide
uuaccugccccaugggugcu

SEQ ID NO: 794 - RNA, 20 nt, Artificial Sequence
  Synthetic polynucleotide
cuuaccugccccaugggugc

SEQ ID NO: 795 - RNA, 23 nt, Artificial Sequence
  Synthetic polynucleotide
caaaacagcugccaaccugcaaa

SEQ ID NO: 796 - RNA, 20 nt, Artificial Sequence
  Synthetic polynucleotide
ggggccuacacggauggcca

SEQ ID NO: 797 - RNA, 20 nt, Artificial Sequence
  Synthetic polynucleotide
acacucggggccuacacgga

SEQ ID NO: 798 - RNA, 20 nt, Artificial Sequence
  Synthetic polynucleotide
ggcgcagcgggcgacggcug

SEQ ID NO: 799 - RNA, 20 nt, Artificial Sequence
  Synthetic polynucleotide
ggggcgcagcgggcgacggc

SEQ ID NO: 800 - RNA, 20 nt, Artificial Sequence
  Synthetic polynucleotide
aucuggggcgcagcgggcga

SEQ ID NO: 801 - RNA, 20 nt, Artificial Sequence
  Synthetic polynucleotide
gccccagaugaggagcugcu

SEQ ID NO: 802 - RNA, 20 nt, Artificial Sequence
  Synthetic polynucleotide
gcccgcugcgccccagauga

SEQ ID NO: 803 - RNA, 20 nt, Artificial Sequence
  Synthetic polynucleotide
cccgcugcgccccagaugag

SEQ ID NO: 804 - RNA, 20 nt, Artificial Sequence
  Synthetic polynucleotide
cgccccagaugaggagcugc

SEQ ID NO: 805 - RNA, 20 nt, Artificial Sequence
  Synthetic polynucleotide
cagcucagcagcuccucauc

SEQ ID NO: 806 - RNA, 20 nt, Artificial Sequence
  Synthetic polynucleotide
cagcucagcagcuccucauc

SEQ ID NO: 807 - RNA, 21 nt, Artificial Sequence
  Synthetic polynucleotide
cagcucagcagcuccucaucu

SEQ ID NO: 808 - RNA, 20 nt, Artificial Sequence
  Synthetic polynucleotide
gagaaacuggagcagcucag

SEQ ID NO: 809 - RNA, 20 nt, Artificial Sequence
  Synthetic polynucleotide
cagcucagcagcuccucauc

SEQ ID NO: 810 - RNA, 20 nt, Artificial Sequence
  Synthetic polynucleotide
cuucccacuccuggagaaac

SEQ ID NO: 811 - RNA, 20 nt, Artificial Sequence
  Synthetic polynucleotide
ucccacuccuggagaaacug

SEQ ID NO: 812 - RNA, 20 nt, Artificial Sequence
  Synthetic polynucleotide
uucccacuccuggagaaacu

SEQ ID NO: 813 - RNA, 20 nt, Artificial Sequence
  Synthetic polynucleotide
ccgccgcuucccacuccugg

SEQ ID NO: 814 - RNA, 20 nt, Artificial Sequence
  Synthetic polynucleotide
cccgccgcuucccacuccug

SEQ ID NO: 815 - RNA, 20 nt, Artificial Sequence
  Synthetic polynucleotide
cuucccacuccuggagaaac

SEQ ID NO: 816 - RNA, 20 nt, Artificial Sequence
  Synthetic polynucleotide
ccccgccgcuucccacuccu

SEQ ID NO: 817 - RNA, 20 nt, Artificial Sequence
  Synthetic polynucleotide
cccuugggccuuagagucaa

SEQ ID NO: 818 - RNA, 20 nt, Artificial Sequence
  Synthetic polynucleotide
ccccuugggccuuagaguca

SEQ ID NO: 819 - RNA, 20 nt, Artificial Sequence
  Synthetic polynucleotide
gcuugcccccuugggccuua

SEQ ID NO: 820 - RNA, 20 nt, Artificial Sequence
  Synthetic polynucleotide
agcuugcccccuugggccuu

SEQ ID NO: 821 - RNA, 20 nt, Artificial Sequence
  Synthetic polynucleotide
cagcuugcccccuugggccu

SEQ ID NO: 822 - RNA, 20 nt, Artificial Sequence
  Synthetic polynucleotide
cagcuugcccccuugggccu

SEQ ID NO: 823 - RNA, 20 nt, Artificial Sequence
  Synthetic polynucleotide
ggcagaccagcuugcccccu

SEQ ID NO: 824 - RNA, 20 nt, Artificial Sequence
  Synthetic polynucleotide
ggcagaccagcuugcccccu

SEQ ID NO: 825 - RNA, 20 nt, Artificial Sequence
  Synthetic polynucleotide
gcagaccagcuugcccccuu

SEQ ID NO: 826 - RNA, 20 nt, Artificial Sequence
  Synthetic polynucleotide
ccccaaaagcguugugggcc

SEQ ID NO: 827 - RNA, 20 nt, Artificial Sequence
  Synthetic polynucleotide
cucacccccaaaagcguugu

SEQ ID NO: 828 - RNA, 20 nt, Artificial Sequence
  Synthetic polynucleotide
ccucacccccaaaagcguug

SEQ ID NO: 829 - RNA, 20 nt, Artificial Sequence
  Synthetic polynucleotide
ccucacccccaaaagcguug

SEQ ID NO: 830 - RNA, 20 nt, Artificial Sequence
  Synthetic polynucleotide
acccucacccccaaaagcgu

SEQ ID NO: 831 - RNA, 20 nt, Artificial Sequence
  Synthetic polynucleotide
ggcagcaccuggcaauggcg

SEQ ID NO: 832 - RNA, 20 nt, Artificial Sequence
  Synthetic polynucleotide
gcagcaccuggcaauggcgu

SEQ ID NO: 833 - RNA, 20 nt, Artificial Sequence
  Synthetic polynucleotide
agcaggcagcaccuggcaau

SEQ ID NO: 834 - RNA, 20 nt, Artificial Sequence
  Synthetic polynucleotide
uagcaggcagcaccuggcaa

SEQ ID NO: 835 - RNA, 20 nt, Artificial Sequence
  Synthetic polynucleotide
cauggcacccaccuggcagg

SEQ ID NO: 836 - RNA, 20 nt, Artificial Sequence
  Synthetic polynucleotide
uagcaggcagcaccuggcaa

SEQ ID NO: 837 - RNA, 20 nt, Artificial Sequence
  Synthetic polynucleotide
cugcuaccccaggccaacug

SEQ ID NO: 838 - RNA, 20 nt, Artificial Sequence
  Synthetic polynucleotide
ugcuaccccaggccaacugc

SEQ ID NO: 839 - RNA, 20 nt, Artificial Sequence
  Synthetic polynucleotide
acgcugcaguuggccugggg

SEQ ID NO: 840 - RNA, 20 nt, Artificial Sequence
  Synthetic polynucleotide
ugcaguuggccugggguagc

SEQ ID NO: 841 - RNA, 20 nt, Artificial Sequence
  Synthetic polynucleotide
cugcaguuggccugggguag

SEQ ID NO: 842 - RNA, 20 nt, Artificial Sequence
  Synthetic polynucleotide
guggacgcugcaguuggccu

SEQ ID NO: 843 - RNA, 20 nt, Artificial Sequence
  Synthetic polynucleotide
uggacgcugcaguuggccug

SEQ ID NO: 844 - RNA, 20 nt, Artificial Sequence
  Synthetic polynucleotide
uguggacgcugcaguuggcc

SEQ ID NO: 845 - RNA, 20 nt, Artificial Sequence
  Synthetic polynucleotide
guggacgcugcaguuggccu

SEQ ID NO: 846 - RNA, 20 nt, Artificial Sequence
  Synthetic polynucleotide
uguggacgcugcaguuggcc

SEQ ID NO: 847 - RNA, 20 nt, Artificial Sequence
  Synthetic polynucleotide
uguggacgcugcaguuggcc

SEQ ID NO: 848 - RNA, 20 nt, Artificial Sequence
  Synthetic polynucleotide
uguggacgcugcaguuggcc

SEQ ID NO: 849 - RNA, 20 nt, Artificial Sequence
  Synthetic polynucleotide
guccacacagcuccaccagc

SEQ ID NO: 850 - RNA, 20 nt, Artificial Sequence
  Synthetic polynucleotide
uccacacagcuccaccagcu

SEQ ID NO: 851 - RNA, 20 nt, Artificial Sequence
  Synthetic polynucleotide
ccacacagcuccaccagcug

SEQ ID NO: 852 - RNA, 20 nt, Artificial Sequence
  Synthetic polynucleotide
acagcuccaccagcugaggc

SEQ ID NO: 853 - RNA, 20 nt, Artificial Sequence
  Synthetic polynucleotide
uccaccagcugaggccagca

SEQ ID NO: 854 - RNA, 20 nt, Artificial Sequence
  Synthetic polynucleotide
ccaccagcugaggccagcau

SEQ ID NO: 855 - RNA, 21 nt, Artificial Sequence
  Synthetic polynucleotide
ccaccagcugaggccagcaug

SEQ ID NO: 856 - RNA, 20 nt, Artificial Sequence
  Synthetic polynucleotide
uccaccagcugaggccagca

SEQ ID NO: 857 - RNA, 20 nt, Artificial Sequence
  Synthetic polynucleotide
accagcugaggccagcaugg

SEQ ID NO: 858 - RNA, 20 nt, Artificial Sequence
  Synthetic polynucleotide
cuguugguggcaguggacac

SEQ ID NO: 859 - RNA, 20 nt, Artificial Sequence
  Synthetic polynucleotide
ccuguugguggcaguggaca

SEQ ID NO: 860 - RNA, 20 nt, Artificial Sequence
  Synthetic polynucleotide
ccuguugguggcaguggaca

SEQ ID NO: 861 - RNA, 20 nt, Artificial Sequence
  Synthetic polynucleotide
gccgccugugcugaggccac

SEQ ID NO: 862 - RNA, 20 nt, Artificial Sequence
  Synthetic polynucleotide
cccacaagccgccugugcug

SEQ ID NO: 863 - RNA, 20 nt, Artificial Sequence
  Synthetic polynucleotide
ccgccugugcugaggccacg

SEQ ID NO: 864 - RNA, 20 nt, Artificial Sequence
  Synthetic polynucleotide
agccgccugugcugaggcca

SEQ ID NO: 865 - RNA, 20 nt, Artificial Sequence
  Synthetic polynucleotide
acccacaagccgccugugcu

SEQ ID NO: 866 - RNA, 20 nt, Artificial Sequence
  Synthetic polynucleotide
cacccacaagccgccugugc

SEQ ID NO: 867 - RNA, 20 nt, Artificial Sequence
  Synthetic polynucleotide
agccgccugugcugaggcca

SEQ ID NO: 868 - RNA, 21 nt, Artificial Sequence
  Synthetic polynucleotide
ccugugcugaggccacgaggu

SEQ ID NO: 869 - RNA, 20 nt, Artificial Sequence
  Synthetic polynucleotide
ggccacgaggucagcccaac

SEQ ID NO: 870 - RNA, 20 nt, Artificial Sequence
  Synthetic polynucleotide
gccacgaggucagcccaacc

SEQ ID NO: 871 - RNA, 21 nt, Artificial Sequence
  Synthetic polynucleotide
ccacgaggucagcccaaccag

SEQ ID NO: 872 - RNA, 20 nt, Artificial Sequence
  Synthetic polynucleotide
gaggccacgaggucagccca

SEQ ID NO: 873 - RNA, 20 nt, Artificial Sequence
  Synthetic polynucleotide
cacgaggucagcccaaccag

SEQ ID NO: 874 - RNA, 20 nt, Artificial Sequence
  Synthetic polynucleotide
cgaggucagcccaaccagug

SEQ ID NO: 875 - RNA, 20 nt, Artificial Sequence
  Synthetic polynucleotide
ggucagcccaaccagugcgu

SEQ ID NO: 876 - RNA, 20 nt, Artificial Sequence
  Synthetic polynucleotide
aggucagcccaaccagugcg

SEQ ID NO: 877 - RNA, 20 nt, Artificial Sequence
  Synthetic polynucleotide
cccaaccagugcgugggcca

SEQ ID NO: 878 - RNA, 20 nt, Artificial Sequence
  Synthetic polynucleotide
cacugguugggcugaccucg

SEQ ID NO: 879 - RNA, 20 nt, Artificial Sequence
  Synthetic polynucleotide
cgcacugguugggcugaccu

SEQ ID NO: 880 - RNA, 20 nt, Artificial Sequence
  Synthetic polynucleotide
ggcccacgcacugguugggc

SEQ ID NO: 881 - RNA, 20 nt, Artificial Sequence
  Synthetic polynucleotide
gcagcaggaagcguggaugc

SEQ ID NO: 882 - RNA, 20 nt, Artificial Sequence
  Synthetic polynucleotide
ggcauggcagcaggaagcgu

SEQ ID NO: 883 - RNA, 20 nt, Artificial Sequence
  Synthetic polynucleotide
ggggcauggcagcaggaagc

SEQ ID NO: 884 - RNA, 20 nt, Artificial Sequence
  Synthetic polynucleotide
gggcauggcagcaggaagcg

SEQ ID NO: 885 - RNA, 20 nt, Artificial Sequence
  Synthetic polynucleotide
uggggcauggcagcaggaag

SEQ ID NO: 886 - RNA, 20 nt, Artificial Sequence
  Synthetic polynucleotide
ccuggggcauggcagcagga

SEQ ID NO: 887 - RNA, 20 nt, Artificial Sequence
  Synthetic polynucleotide
ugccccaggucuggaaugca

SEQ ID NO: 888 - RNA, 20 nt, Artificial Sequence
  Synthetic polynucleotide
ugcugccaugccccaggucu

SEQ ID NO: 889 - RNA, 20 nt, Artificial Sequence
  Synthetic polynucleotide
caugccccaggucuggaaug

SEQ ID NO: 890 - RNA, 20 nt, Artificial Sequence
  Synthetic polynucleotide
gacuuugcauuccagaccug

SEQ ID NO: 891 - RNA, 20 nt, Artificial Sequence
  Synthetic polynucleotide
ugcauuccagaccuggggca

SEQ ID NO: 892 - RNA, 20 nt, Artificial Sequence
  Synthetic polynucleotide
ugacuuugcauuccagaccu

SEQ ID NO: 893 - RNA, 20 nt, Artificial Sequence
  Synthetic polynucleotide
ugacuuugcauuccagaccu

SEQ ID NO: 894 - RNA, 20 nt, Artificial Sequence
  Synthetic polynucleotide
uugacuuugcauuccagacc

SEQ ID NO: 895 - RNA, 20 nt, Artificial Sequence
  Synthetic polynucleotide
uugacuuugcauuccagacc

SEQ ID NO: 896 - RNA, 20 nt, Artificial Sequence
  Synthetic polynucleotide
uugacuuugcauuccagacc

SEQ ID NO: 897 - RNA, 20 nt, Artificial Sequence
  Synthetic polynucleotide
gcauggaaucccggccccuc

SEQ ID NO: 898 - RNA, 20 nt, Artificial Sequence
  Synthetic polynucleotide
cauggaaucccggccccuca

SEQ ID NO: 899 - RNA, 20 nt, Artificial Sequence
  Synthetic polynucleotide
auggaaucccggccccucag

SEQ ID NO: 900 - RNA, 20 nt, Artificial Sequence
  Synthetic polynucleotide
gaaucccggccccucaggag

SEQ ID NO: 901 - RNA, 20 nt, Artificial Sequence
  Synthetic polynucleotide
aaucccggccccucaggagc

SEQ ID NO: 902 - RNA, 20 nt, Artificial Sequence
  Synthetic polynucleotide
aucccggccccucaggagca

SEQ ID NO: 903 - RNA, 20 nt, Artificial Sequence
  Synthetic polynucleotide
cccggccccucaggagcagg

SEQ ID NO: 904 - RNA, 21 nt, Artificial Sequence
  Synthetic polynucleotide
ccggccccucaggagcaggug

SEQ ID NO: 905 - RNA, 20 nt, Artificial Sequence
  Synthetic polynucleotide
ggaaucccggccccucagga

SEQ ID NO: 906 - RNA, 20 nt, Artificial Sequence
  Synthetic polynucleotide
gcauggaaucccggccccuc

SEQ ID NO: 907 - RNA, 20 nt, Artificial Sequence
  Synthetic polynucleotide
aaucccggccccucaggagc

SEQ ID NO: 908 - RNA, 20 nt, Artificial Sequence
  Synthetic polynucleotide
ggccccucaggagcagguga

SEQ ID NO: 909 - RNA, 20 nt, Artificial Sequence
  Synthetic polynucleotide
gccccucaggagcaggugaa

SEQ ID NO: 910 - RNA, 20 nt, Artificial Sequence
  Synthetic polynucleotide
ccccucaggagcaggugaag

SEQ ID NO: 911 - RNA, 20 nt, Artificial Sequence
  Synthetic polynucleotide
ggaaucccggccccucagga

SEQ ID NO: 912 - RNA, 20 nt, Artificial Sequence
  Synthetic polynucleotide
cgcaggccacggucaccugc

SEQ ID NO: 913 - RNA, 20 nt, Artificial Sequence
  Synthetic polynucleotide
caggccacggucaccugcca

SEQ ID NO: 914 - RNA, 20 nt, Artificial Sequence
  Synthetic polynucleotide
gcaggccacggucaccugcc

SEQ ID NO: 915 - RNA, 20 nt, Artificial Sequence
  Synthetic polynucleotide
cacugcagccagucaggguc

SEQ ID NO: 916 - RNA, 20 nt, Artificial Sequence
  Synthetic polynucleotide
ggagggcacugcagccaguc

SEQ ID NO: 917 - RNA, 20 nt, Artificial Sequence
  Synthetic polynucleotide
gagggcacugcagccaguca

SEQ ID NO: 918 - RNA, 20 nt, Artificial Sequence
  Synthetic polynucleotide
ggagggcacugcagccaguc

SEQ ID NO: 919 - RNA, 20 nt, Artificial Sequence
  Synthetic polynucleotide
cccugggaccucccacgucc

SEQ ID NO: 920 - RNA, 20 nt, Artificial Sequence
  Synthetic polynucleotide
ccugggaccucccacguccu

SEQ ID NO: 921 - RNA, 20 nt, Artificial Sequence
  Synthetic polynucleotide
cccugggaccucccacgucc

SEQ ID NO: 922 - RNA, 20 nt, Artificial Sequence
  Synthetic polynucleotide
ccugggaccucccacguccu

SEQ ID NO: 923 - RNA, 20 nt, Artificial Sequence
  Synthetic polynucleotide
cccagggagggcacugcagc

SEQ ID NO: 924 - RNA, 20 nt, Artificial Sequence
  Synthetic polynucleotide
aggucccagggagggcacug

SEQ ID NO: 925 - RNA, 20 nt, Artificial Sequence
  Synthetic polynucleotide
gucccagggagggcacugca

SEQ ID NO: 926 - RNA, 20 nt, Artificial Sequence
  Synthetic polynucleotide
gacuacacacguguugucua

SEQ ID NO: 927 - RNA, 20 nt, Artificial Sequence
  Synthetic polynucleotide
acacguguugucuacggcgu

SEQ ID NO: 928 - RNA, 20 nt, Artificial Sequence
  Synthetic polynucleotide
cacacguguugucuacggcg

SEQ ID NO: 929 - RNA, 20 nt, Artificial Sequence
  Synthetic polynucleotide
acuacacacguguugucuac

SEQ ID NO: 930 - RNA, 20 nt, Artificial Sequence
  Synthetic polynucleotide
gacuacacacguguugucua

SEQ ID NO: 931 - RNA, 20 nt, Artificial Sequence
  Synthetic polynucleotide
cccuucgcuggugcugccug

SEQ ID NO: 932 - RNA, 20 nt, Artificial Sequence
  Synthetic polynucleotide
ccuucgcuggugcugccugu

SEQ ID NO: 933 - RNA, 20 nt, Artificial Sequence
  Synthetic polynucleotide
gcugucacggccccuucgcu

SEQ ID NO: 934 - RNA, 20 nt, Artificial Sequence
  Synthetic polynucleotide
ggcugucacggccccuucgc

SEQ ID NO: 935 - RNA, 20 nt, Artificial Sequence
  Synthetic polynucleotide
gccccuucgcuggugcugcc

SEQ ID NO: 936 - RNA, 20 nt, Artificial Sequence
  Synthetic polynucleotide
gcagauggcaacggcuguca

SEQ ID NO: 937 - RNA, 20 nt, Artificial Sequence
  Synthetic polynucleotide
gcuccggcagcagauggcaa

SEQ ID NO: 938 - RNA, 21 nt, Artificial Sequence
  Synthetic polynucleotide
ccaggaccgccuggagcugac

SEQ ID NO: 939 - RNA, 20 nt, Artificial Sequence
  Synthetic polynucleotide
ccaggaccgccuggagcuga

SEQ ID NO: 940 - RNA, 20 nt, Artificial Sequence
  Synthetic polynucleotide
ccaccaggaccgccuggagc

SEQ ID NO: 941 - RNA, 20 nt, Artificial Sequence
  Synthetic polynucleotide
gcggccaccaggaccgccug

SEQ ID NO: 942 - RNA, 20 nt, Artificial Sequence
  Synthetic polynucleotide
agcggccaccaggaccgccu

SEQ ID NO: 943 - RNA, 20 nt, Artificial Sequence
  Synthetic polynucleotide
cagcggccaccaggaccgcc

SEQ ID NO: 944 - RNA, 20 nt, Artificial Sequence
  Synthetic polynucleotide
caccaggaccgccuggagcu

SEQ ID NO: 945 - RNA, 20 nt, Artificial Sequence
  Synthetic polynucleotide
ccaggaccgccuggagcuga

SEQ ID NO: 946 - RNA, 20 nt, Artificial Sequence
  Synthetic polynucleotide
cagcggccaccaggaccgcc

SEQ ID NO: 947 - RNA, 20 nt, Artificial Sequence
  Synthetic polynucleotide
ggcgcccgugcgcaggagga

SEQ ID NO: 948 - RNA, 20 nt, Artificial Sequence
  Synthetic polynucleotide
gcgcccgugcgcaggaggac

SEQ ID NO: 949 - RNA, 20 nt, Artificial Sequence
  Synthetic polynucleotide
cgcccgugcgcaggaggacg

SEQ ID NO: 950 - RNA, 20 nt, Artificial Sequence
  Synthetic polynucleotide
gcccgugcgcaggaggacga

SEQ ID NO: 951 - RNA, 20 nt, Artificial Sequence
  Synthetic polynucleotide
cgugcgcaggaggacgagga

SEQ ID NO: 952 - RNA, 20 nt, Artificial Sequence
  Synthetic polynucleotide
gugcgcaggaggacgaggac

SEQ ID NO: 953 - RNA, 20 nt, Artificial Sequence
  Synthetic polynucleotide
gcgcaggaggacgaggacgg

SEQ ID NO: 954 - RNA, 20 nt, Artificial Sequence
  Synthetic polynucleotide
cgugcgcaggaggacgagga

SEQ ID NO: 955 - RNA, 20 nt, Artificial Sequence
  Synthetic polynucleotide
caggcaaccuccacggaucc

SEQ ID NO: 956 - RNA, 20 nt, Artificial Sequence
  Synthetic polynucleotide
gacccaccucucgcagucag

SEQ ID NO: 957 - RNA, 20 nt, Artificial Sequence
  Synthetic polynucleotide
ugcaggcccaggcugcccgc

SEQ ID NO: 958 - RNA, 20 nt, Artificial Sequence
  Synthetic polynucleotide
gcaggcccaggcugcccgcc

SEQ ID NO: 959 - RNA, 20 nt, Artificial Sequence
  Synthetic polynucleotide
caggcccaggcugcccgccg

SEQ ID NO: 960 - RNA, 20 nt, Artificial Sequence
  Synthetic polynucleotide
gcaggcccaggcugcccgcc

SEQ ID NO: 961 - RNA, 20 nt, Artificial Sequence
  Synthetic polynucleotide
ugcaggcccaggcugcccgc

SEQ ID NO: 962 - RNA, 20 nt, Artificial Sequence
  Synthetic polynucleotide
aggcccaggcugcccgccgg

SEQ ID NO: 963 - RNA, 20 nt, Artificial Sequence
  Synthetic polynucleotide
ugucuuugcccagagcaucc

SEQ ID NO: 964 - RNA, 20 nt, Artificial Sequence
  Synthetic polynucleotide
ucuuugcccagagcaucccg

SEQ ID NO: 965 - RNA, 20 nt, Artificial Sequence
  Synthetic polynucleotide
cuuugcccagagcaucccgu

SEQ ID NO: 966 - RNA, 20 nt, Artificial Sequence
  Synthetic polynucleotide
ccagagcaucccguggaacc

SEQ ID NO: 967 - RNA, 20 nt, Artificial Sequence
  Synthetic polynucleotide
ccagagcaucccguggaacc

SEQ ID NO: 968 - RNA, 20 nt, Artificial Sequence
  Synthetic polynucleotide
ccacgggaugcucugggcaa

SEQ ID NO: 969 - RNA, 20 nt, Artificial Sequence
  Synthetic polynucleotide
uccacgggaugcucugggca

SEQ ID NO: 970 - RNA, 20 nt, Artificial Sequence
  Synthetic polynucleotide
ccagguuccacgggaugcuc

SEQ ID NO: 971 - RNA, 20 nt, Artificial Sequence
  Synthetic polynucleotide
cagguuccacgggaugcucu

SEQ ID NO: 972 - RNA, 20 nt, Artificial Sequence
  Synthetic polynucleotide
ccagguuccacgggaugcuc

SEQ ID NO: 973 - RNA, 20 nt, Artificial Sequence
  Synthetic polynucleotide
gcggaugaauaccagccccc

SEQ ID NO: 974 - RNA, 20 nt, Artificial Sequence
  Synthetic polynucleotide
augaauaccagccccccggu

SEQ ID NO: 975 - RNA, 20 nt, Artificial Sequence
  Synthetic polynucleotide
ugaauaccagccccccggua

SEQ ID NO: 976 - RNA, 20 nt, Artificial Sequence
  Synthetic polynucleotide
ccagcauacagagugaccac

SEQ ID NO: 977 - RNA, 20 nt, Artificial Sequence
  Synthetic polynucleotide
cagcauacagagugaccacc

SEQ ID NO: 978 - RNA, 20 nt, Artificial Sequence
  Synthetic polynucleotide
ccagcauacagagugaccac

SEQ ID NO: 979 - RNA, 20 nt, Artificial Sequence
  Synthetic polynucleotide
agcauacagagugaccaccg

SEQ ID NO: 980 - RNA, 20 nt, Artificial Sequence
  Synthetic polynucleotide
cagagugaccaccgggaaau

SEQ ID NO: 981 - RNA, 20 nt, Artificial Sequence
  Synthetic polynucleotide
agcauacagagugaccaccg

SEQ ID NO: 982 - RNA, 20 nt, Artificial Sequence
  Synthetic polynucleotide
cuuccacagacagguaagca

SEQ ID NO: 983 - RNA, 20 nt, Artificial Sequence
  Synthetic polynucleotide
gacagguaagcacggccguc

SEQ ID NO: 984 - RNA, 20 nt, Artificial Sequence
  Synthetic polynucleotide
cagacagguaagcacggccg

SEQ ID NO: 985 - RNA, 20 nt, Artificial Sequence
  Synthetic polynucleotide
cgugcucaacugccaaggga

SEQ ID NO: 986 - RNA, 20 nt, Artificial Sequence
  Synthetic polynucleotide
gugcucaacugccaagggaa

SEQ ID NO: 987 - RNA, 20 nt, Artificial Sequence
  Synthetic polynucleotide
cgugcucaacugccaaggga

SEQ ID NO: 988 - RNA, 20 nt, Artificial Sequence
  Synthetic polynucleotide
caacugccaagggaagggca

SEQ ID NO: 989 - RNA, 20 nt, Artificial Sequence
  Synthetic polynucleotide
ugccaagggaagggcacggu

SEQ ID NO: 990 - RNA, 20 nt, Artificial Sequence
  Synthetic polynucleotide
gccaagggaagggcacgguu

SEQ ID NO: 991 - RNA, 20 nt, Artificial Sequence
  Synthetic polynucleotide
caagggaagggcacgguuag

SEQ ID NO: 992 - RNA, 20 nt, Artificial Sequence
  Synthetic polynucleotide
cucaacugccaagggaaggg

SEQ ID NO: 993 - RNA, 20 nt, Artificial Sequence
  Synthetic polynucleotide
uucggaaaagccagcugguc

SEQ ID NO: 994 - RNA, 20 nt, Artificial Sequence
  Synthetic polynucleotide
aaaagccagcugguccagcc

SEQ ID NO: 995 - RNA, 20 nt, Artificial Sequence
  Synthetic polynucleotide
aagccagcugguccagccug

SEQ ID NO: 996 - RNA, 20 nt, Artificial Sequence
  Synthetic polynucleotide
aagccagcugguccagccug

SEQ ID NO: 997 - RNA, 20 nt, Artificial Sequence
  Synthetic polynucleotide
aagccagcugguccagccug

SEQ ID NO: 998 - RNA, 20 nt, Artificial Sequence
  Synthetic polynucleotide
agccagcugguccagccugu

SEQ ID NO: 999 - RNA, 20 nt, Artificial Sequence
  Synthetic polynucleotide
gccagcugguccagccugug

SEQ ID NO: 1000 - RNA, 20 nt, Artificial Sequence
  Synthetic polynucleotide
agccagcugguccagccugu

SEQ ID NO: 1001 - RNA, 20 nt, Artificial Sequence
  Synthetic polynucleotide
gguccagccuguggggccac

SEQ ID NO: 1002 - RNA, 20 nt, Artificial Sequence
  Synthetic polynucleotide
guccagccuguggggccacu

SEQ ID NO: 1003 - RNA, 20 nt, Artificial Sequence
  Synthetic polynucleotide
ccagccuguggggccacugg

SEQ ID NO: 1004 - RNA, 20 nt, Artificial Sequence
  Synthetic polynucleotide
cagccuguggggccacuggu

SEQ ID NO: 1005 - RNA, 20 nt, Artificial Sequence
  Synthetic polynucleotide
cugguccagccuguggggcc

SEQ ID NO: 1006 - RNA, 20 nt, Artificial Sequence
  Synthetic polynucleotide
guccagccuguggggccacu

SEQ ID NO: 1007 - RNA, 20 nt, Artificial Sequence
  Synthetic polynucleotide
gguccagccuguggggccac

SEQ ID NO: 1008 - RNA, 20 nt, Artificial Sequence
  Synthetic polynucleotide
ccagccuguggggccacugg

SEQ ID NO: 1009 - RNA, 20 nt, Artificial Sequence
  Synthetic polynucleotide
caacgccgccugccagcgcc

SEQ ID NO: 1010 - RNA, 20 nt, Artificial Sequence
  Synthetic polynucleotide
aacgccgccugccagcgccu

SEQ ID NO: 1011 - RNA, 20 nt, Artificial Sequence
  Synthetic polynucleotide
cgccgccugccagcgccugg

SEQ ID NO: 1012 - RNA, 20 nt, Artificial Sequence
  Synthetic polynucleotide
gccgccugccagcgccuggc

SEQ ID NO: 1013 - RNA, 20 nt, Artificial Sequence
  Synthetic polynucleotide
ccgccugccagcgccuggcg

SEQ ID NO: 1014 - RNA, 20 nt, Artificial Sequence
  Synthetic polynucleotide
cgccugccagcgccuggcga

SEQ ID NO: 1015 - RNA, 20 nt, Artificial Sequence
  Synthetic polynucleotide
ugccagcgccuggcgagggc

SEQ ID NO: 1016 - RNA, 20 nt, Artificial Sequence
  Synthetic polynucleotide
gccagcgccuggcgagggcu

SEQ ID NO: 1017 - RNA, 20 nt, Artificial Sequence
  Synthetic polynucleotide
ccagcgccuggcgagggcug

SEQ ID NO: 1018 - RNA, 20 nt, Artificial Sequence
  Synthetic polynucleotide
ugccagcgccuggcgagggc

SEQ ID NO: 1019 - RNA, 20 nt, Artificial Sequence
  Synthetic polynucleotide
ugccagcgccuggcgagggc

SEQ ID NO: 1020 - RNA, 20 nt, Artificial Sequence
  Synthetic polynucleotide
caccaaugcccaagaccagc

SEQ ID NO: 1021 - RNA, 20 nt, Artificial Sequence
  Synthetic polynucleotide
accaaugcccaagaccagcc

SEQ ID NO: 1022 - RNA, 20 nt, Artificial Sequence
  Synthetic polynucleotide
caaugcccaagaccagccgg

SEQ ID NO: 1023 - RNA, 20 nt, Artificial Sequence
  Synthetic polynucleotide
ccaagaccagccggugaccc

SEQ ID NO: 1024 - RNA, 20 nt, Artificial Sequence
  Synthetic polynucleotide
caagaccagccggugacccu

SEQ ID NO: 1025 - RNA, 21 nt, Artificial Sequence
  Synthetic polynucleotide
caagaccagccggugacccug

SEQ ID NO: 1026 - RNA, 20 nt, Artificial Sequence
  Synthetic polynucleotide
gccaccaaugcccaagacca

SEQ ID NO: 1027 - RNA, 20 nt, Artificial Sequence
  Synthetic polynucleotide
caccaaugcccaagaccagc

SEQ ID NO: 1028 - RNA, 20 nt, Artificial Sequence
  Synthetic polynucleotide
ccaagaccagccggugaccc

SEQ ID NO: 1029 - RNA, 20 nt, Artificial Sequence
  Synthetic polynucleotide
agaccagccggugacccugg

SEQ ID NO: 1030 - RNA, 20 nt, Artificial Sequence
  Synthetic polynucleotide
cugcuuugugucacagagug

SEQ ID NO: 1031 - RNA, 20 nt, Artificial Sequence
  Synthetic polynucleotide
ugucacagagugggacauca

SEQ ID NO: 1032 - RNA, 20 nt, Artificial Sequence
  Synthetic polynucleotide
gucacagagugggacaucac

SEQ ID NO: 1033 - RNA, 20 nt, Artificial Sequence
  Synthetic polynucleotide
acaucacaggcugcugccca

SEQ ID NO: 1034 - RNA, 20 nt, Artificial Sequence
  Synthetic polynucleotide
aucacaggcugcugcccacg

SEQ ID NO: 1035 - RNA, 20 nt, Artificial Sequence
  Synthetic polynucleotide
caggcugcugcccacguggc

SEQ ID NO: 1036 - RNA, 20 nt, Artificial Sequence
  Synthetic polynucleotide
cacaggcugcugcccacgug

SEQ ID NO: 1037 - RNA, 20 nt, Artificial Sequence
  Synthetic polynucleotide
ggccgaguugaggcagagac

SEQ ID NO: 1038 - RNA, 20 nt, Artificial Sequence
  Synthetic polynucleotide
agggaaccaggccucauuga

SEQ ID NO: 1039 - RNA, 20 nt, Artificial Sequence
  Synthetic polynucleotide
cucagggaaccaggccucau

SEQ ID NO: 1040 - RNA, 20 nt, Artificial Sequence
  Synthetic polynucleotide
uccucagggaaccaggccuc

SEQ ID NO: 1041 - RNA, 20 nt, Artificial Sequence
  Synthetic polynucleotide
cccugaggaccagcggguac

SEQ ID NO: 1042 - RNA, 20 nt, Artificial Sequence
  Synthetic polynucleotide
cagcggguacugacccccaa

SEQ ID NO: 1043 - RNA, 20 nt, Artificial Sequence
  Synthetic polynucleotide
cagcugccaaccugcaaaaa

SEQ ID NO: 1044 - RNA, 20 nt, Artificial Sequence
  Synthetic polynucleotide
gccaaccugcaaaaagggcc

SEQ ID NO: 1045 - RNA, 20 nt, Artificial Sequence
  Synthetic polynucleotide
gccaaccugcaaaaagggcc

SEQ ID NO: 1046 - RNA, 20 nt, Artificial Sequence
  Synthetic polynucleotide
acagcugccaaccugcaaaa

SEQ ID NO: 1047 - RNA, 20 nt, Artificial Sequence
  Synthetic polynucleotide
acagcugccaaccugcaaaa

SEQ ID NO: 1048 - RNA, 20 nt, Artificial Sequence
  Synthetic polynucleotide
aacagcugccaaccugcaaa

SEQ ID NO: 1049 - RNA, 20 nt, Artificial Sequence
  Synthetic polynucleotide
gccaaccugcaaaaagggcc

SEQ ID NO: 1050 - RNA, 20 nt, Artificial Sequence
  Synthetic polynucleotide
gcagguuggcagcuguuuug

SEQ ID NO: 1051 - RNA, 20 nt, Artificial Sequence
  Synthetic polynucleotide
cagguuggcagcuguuuugc

SEQ ID NO: 1052 - RNA, 20 nt, Artificial Sequence
  Synthetic polynucleotide
agguuggcagcuguuuugca

SEQ ID NO: 1053 - RNA, 20 nt, Artificial Sequence
  Synthetic polynucleotide
gcagcuguuuugcaggacug

SEQ ID NO: 1054 - RNA, 20 nt, Artificial Sequence
  Synthetic polynucleotide
gaccauacaguccugcaaaa

SEQ ID NO: 1055 - RNA, 20 nt, Artificial Sequence
  Synthetic polynucleotide
uaaggcccaagggggcaagc

SEQ ID NO: 1056 - RNA, 20 nt, Artificial Sequence
  Synthetic polynucleotide
acucuaaggcccaagggggc

SEQ ID NO: 1057 - RNA, 20 nt, Artificial Sequence
  Synthetic polynucleotide
ucuaaggcccaagggggcaa

SEQ ID NO: 1058 - RNA, 20 nt, Artificial Sequence
  Synthetic polynucleotide
cugcuaccccaggccaacug

SEQ ID NO: 1059 - RNA, 20 nt, Artificial Sequence
  Synthetic polynucleotide
ugcuaccccaggccaacugc

SEQ ID NO: 1060 - RNA, 22 nt, Artificial Sequence
  Synthetic polynucleotide
caggccaacugcagcguccaca

SEQ ID NO: 1061 - RNA, 20 nt, Artificial Sequence
  Synthetic polynucleotide
ccaacagggccacguccuca

SEQ ID NO: 1062 - RNA, 20 nt, Artificial Sequence
  Synthetic polynucleotide
caacagggccacguccucac

SEQ ID NO: 1063 - RNA, 20 nt, Artificial Sequence
  Synthetic polynucleotide
cagggccacguccucacagg

SEQ ID NO: 1064 - RNA, 21 nt, Artificial Sequence
  Synthetic polynucleotide
cagggccacguccucacaggu

SEQ ID NO: 1065 - RNA, 20 nt, Artificial Sequence
  Synthetic polynucleotide
accaacagggccacguccuc

SEQ ID NO: 1066 - RNA, 20 nt, Artificial Sequence
  Synthetic polynucleotide
cccagugggagcugcagccu

SEQ ID NO: 1067 - RNA, 20 nt, Artificial Sequence
  Synthetic polynucleotide
ccagugggagcugcagccug

SEQ ID NO: 1068 - RNA, 20 nt, Artificial Sequence
  Synthetic polynucleotide
ucccagugggagcugcagcc

SEQ ID NO: 1069 - RNA, 20 nt, Artificial Sequence
  Synthetic polynucleotide
cccagugggagcugcagccu

SEQ ID NO: 1070 - RNA, 20 nt, Artificial Sequence
  Synthetic polynucleotide
ucccagugggagcugcagcc

SEQ ID NO: 1071 - RNA, 20 nt, Artificial Sequence
  Synthetic polynucleotide
ccaccucccagugggagcug

SEQ ID NO: 1072 - RNA, 20 nt, Artificial Sequence
  Synthetic polynucleotide
ucccagugggagcugcagcc

SEQ ID NO: 1073 - RNA, 20 nt, Artificial Sequence
  Synthetic polynucleotide
ggccacgaggucagcccaac

SEQ ID NO: 1074 - RNA, 20 nt, Artificial Sequence
  Synthetic polynucleotide
gccacgaggucagcccaacc

SEQ ID NO: 1075 - RNA, 20 nt, Artificial Sequence
  Synthetic polynucleotide
cacgaggucagcccaaccag

SEQ ID NO: 1076 - RNA, 20 nt, Artificial Sequence
  Synthetic polynucleotide
cgaggucagcccaaccagug

SEQ ID NO: 1077 - RNA, 20 nt, Artificial Sequence
  Synthetic polynucleotide
gaggccacgaggucagccca

SEQ ID NO: 1078 - RNA, 20 nt, Artificial Sequence
  Synthetic polynucleotide
ggucagcccaaccagugcgu

SEQ ID NO: 1079 - RNA, 20 nt, Artificial Sequence
  Synthetic polynucleotide
aggucagcccaaccagugcg

SEQ ID NO: 1080 - RNA, 20 nt, Artificial Sequence
  Synthetic polynucleotide
ggccacgaggucagcccaac

SEQ ID NO: 1081 - RNA, 20 nt, Artificial Sequence
  Synthetic polynucleotide
gccacgaggucagcccaacc

SEQ ID NO: 1082 - RNA, 20 nt, Artificial Sequence
  Synthetic polynucleotide
cacgaggucagcccaaccag

SEQ ID NO: 1083 - RNA, 20 nt, Artificial Sequence
  Synthetic polynucleotide
cgaggucagcccaaccagug

SEQ ID NO: 1084 - RNA, 20 nt, Artificial Sequence
  Synthetic polynucleotide
aggucagcccaaccagugcg

SEQ ID NO: 1085 - RNA, 20 nt, Artificial Sequence
  Synthetic polynucleotide
ggucagcccaaccagugcgu

SEQ ID NO: 1086 - RNA, 20 nt, Artificial Sequence
  Synthetic polynucleotide
cccaaccagugcgugggcca

SEQ ID NO: 1087 - RNA, 20 nt, Artificial Sequence
  Synthetic polynucleotide
ccagugcgugggccacaggg

SEQ ID NO: 1088 - RNA, 20 nt, Artificial Sequence
  Synthetic polynucleotide
accagugcgugggccacagg

SEQ ID NO: 1089 - RNA, 20 nt, Artificial Sequence
  Synthetic polynucleotide
aaccagugcgugggccacag

SEQ ID NO: 1090 - RNA, 20 nt, Artificial Sequence
  Synthetic polynucleotide
caaccagugcgugggccaca

SEQ ID NO: 1091 - RNA, 20 nt, Artificial Sequence
  Synthetic polynucleotide
ccaaccagugcgugggccac

SEQ ID NO: 1092 - RNA, 20 nt, Artificial Sequence
  Synthetic polynucleotide
caaccagugcgugggccaca

SEQ ID NO: 1093 - RNA, 20 nt, Artificial Sequence
  Synthetic polynucleotide
caggagcaggugaagaggcc

SEQ ID NO: 1094 - RNA, 20 nt, Artificial Sequence
  Synthetic polynucleotide
ccccucaggagcaggugaag

SEQ ID NO: 1095 - RNA, 20 nt, Artificial Sequence
  Synthetic polynucleotide
gccccucaggagcaggugaa

SEQ ID NO: 1096 - RNA, 20 nt, Artificial Sequence
  Synthetic polynucleotide
ggccccucaggagcagguga

SEQ ID NO: 1097 - RNA, 20 nt, Artificial Sequence
  Synthetic polynucleotide
cggccccucaggagcaggug

SEQ ID NO: 1098 - RNA, 20 nt, Artificial Sequence
  Synthetic polynucleotide
cccggccccucaggagcagg

SEQ ID NO: 1099 - RNA, 20 nt, Artificial Sequence
  Synthetic polynucleotide
ggccccucaggagcagguga

SEQ ID NO: 1100 - RNA, 20 nt, Artificial Sequence
  Synthetic polynucleotide
gccccucaggagcaggugaa

SEQ ID NO: 1101 - RNA, 20 nt, Artificial Sequence
  Synthetic polynucleotide
ccccucaggagcaggugaag

SEQ ID NO: 1102 - RNA, 20 nt, Artificial Sequence
  Synthetic polynucleotide
caggagcaggugaagaggcc

SEQ ID NO: 1103 - RNA, 20 nt, Artificial Sequence
  Synthetic polynucleotide
ggagcaggugaagaggcccg

SEQ ID NO: 1104 - RNA, 20 nt, Artificial Sequence
  Synthetic polynucleotide
gagcaggugaagaggcccgu

SEQ ID NO: 1105 - RNA, 20 nt, Artificial Sequence
  Synthetic polynucleotide
agcaggugaagaggcccgug

SEQ ID NO: 1106 - RNA, 21 nt, Artificial Sequence
  Synthetic polynucleotide
caggugaagaggcccgugagg

SEQ ID NO: 1107 - RNA, 20 nt, Artificial Sequence
  Synthetic polynucleotide
ccagcccuccucgcaggcca

SEQ ID NO: 1108 - RNA, 20 nt, Artificial Sequence
  Synthetic polynucleotide
caggguccagcccuccucgc

SEQ ID NO: 1109 - RNA, 20 nt, Artificial Sequence
  Synthetic polynucleotide
ucaggguccagcccuccucg

SEQ ID NO: 1110 - RNA, 20 nt, Artificial Sequence
  Synthetic polynucleotide
guccagcccuccucgcaggc

SEQ ID NO: 1111 - RNA, 20 nt, Artificial Sequence
  Synthetic polynucleotide
ggcaccuggcgcaggccucc

SEQ ID NO: 1112 - RNA, 20 nt, Artificial Sequence
  Synthetic polynucleotide
gcaccuggcgcaggccuccc

SEQ ID NO: 1113 - RNA, 20 nt, Artificial Sequence
  Synthetic polynucleotide
caccuggcgcaggccuccca

SEQ ID NO: 1114 - RNA, 20 nt, Artificial Sequence
  Synthetic polynucleotide
accuggcgcaggccucccag

SEQ ID NO: 1115 - RNA, 20 nt, Artificial Sequence
  Synthetic polynucleotide
cgcaggccucccaggagcuc

SEQ ID NO: 1116 - RNA, 20 nt, Artificial Sequence
  Synthetic polynucleotide
gcaggccucccaggagcucc

SEQ ID NO: 1117 - RNA, 21 nt, Artificial Sequence
  Synthetic polynucleotide
caggccucccaggagcuccag

SEQ ID NO: 1118 - RNA, 20 nt, Artificial Sequence
  Synthetic polynucleotide
ggcgcaggccucccaggagc

SEQ ID NO: 1119 - RNA, 19 nt, Artificial Sequence
  Synthetic polynucleotide
gcaccuggcgcaggccucc

SEQ ID NO: 1120 - RNA, 20 nt, Artificial Sequence
  Synthetic polynucleotide
ccucccaggagcuccaguga

SEQ ID NO: 1121 - RNA, 20 nt, Artificial Sequence
  Synthetic polynucleotide
aggccucccaggagcuccag

SEQ ID NO: 1122 - RNA, 20 nt, Artificial Sequence
  Synthetic polynucleotide
gcaggccucccaggagcucc

SEQ ID NO: 1123 - RNA, 20 nt, Artificial Sequence
  Synthetic polynucleotide
cgcaggccucccaggagcuc

SEQ ID NO: 1124 - RNA, 21 nt, Artificial Sequence
  Synthetic polynucleotide
ccaggaccgccuggagcugac

SEQ ID NO: 1125 - RNA, 20 nt, Artificial Sequence
  Synthetic polynucleotide
ccaggaccgccuggagcuga

SEQ ID NO: 1126 - RNA, 20 nt, Artificial Sequence
  Synthetic polynucleotide
ccaccaggaccgccuggagc

SEQ ID NO: 1127 - RNA, 20 nt, Artificial Sequence
  Synthetic polynucleotide
gcggccaccaggaccgccug

SEQ ID NO: 1128 - RNA, 20 nt, Artificial Sequence
  Synthetic polynucleotide
agcggccaccaggaccgccu

SEQ ID NO: 1129 - RNA, 20 nt, Artificial Sequence
  Synthetic polynucleotide
cagcggccaccaggaccgcc

SEQ ID NO: 1130 - RNA, 20 nt, Artificial Sequence
  Synthetic polynucleotide
caccaggaccgccuggagcu

SEQ ID NO: 1131 - RNA, 20 nt, Artificial Sequence
  Synthetic polynucleotide
ccaggaccgccuggagcuga

SEQ ID NO: 1132 - RNA, 20 nt, Artificial Sequence
  Synthetic polynucleotide
cagcggccaccaggaccgcc

SEQ ID NO: 1133 - RNA, 20 nt, Artificial Sequence
  Synthetic polynucleotide
ggcgcccgugcgcaggagga

SEQ ID NO: 1134 - RNA, 20 nt, Artificial Sequence
  Synthetic polynucleotide
gcgcccgugcgcaggaggac

SEQ ID NO: 1135 - RNA, 20 nt, Artificial Sequence
  Synthetic polynucleotide
cgcccgugcgcaggaggacg

SEQ ID NO: 1136 - RNA, 20 nt, Artificial Sequence
  Synthetic polynucleotide
gcccgugcgcaggaggacga

SEQ ID NO: 1137 - RNA, 20 nt, Artificial Sequence
  Synthetic polynucleotide
cgugcgcaggaggacgagga

SEQ ID NO: 1138 - RNA, 20 nt, Artificial Sequence
  Synthetic polynucleotide
gugcgcaggaggacgaggac

SEQ ID NO: 1139 - RNA, 20 nt, Artificial Sequence
  Synthetic polynucleotide
gcgcaggaggacgaggacgg

SEQ ID NO: 1140 - RNA, 20 nt, Artificial Sequence
  Synthetic polynucleotide
cgugcgcaggaggacgagga

SEQ ID NO: 1141 - RNA, 20 nt, Artificial Sequence
  Synthetic polynucleotide
caggcaaccuccacggaucc

SEQ ID NO: 1142 - RNA, 20 nt, Artificial Sequence
  Synthetic polynucleotide
gacccaccucucgcagucag

SEQ ID NO: 1143 - RNA, 20 nt, Artificial Sequence
  Synthetic polynucleotide
ugcaggcccaggcugcccgc

SEQ ID NO: 1144 - RNA, 20 nt, Artificial Sequence
  Synthetic polynucleotide
gcaggcccaggcugcccgcc

SEQ ID NO: 1145 - RNA, 20 nt, Artificial Sequence
  Synthetic polynucleotide
caggcccaggcugcccgccg

SEQ ID NO: 1146 - RNA, 20 nt, Artificial Sequence
  Synthetic polynucleotide
gcaggcccaggcugcccgcc

SEQ ID NO: 1147 - RNA, 20 nt, Artificial Sequence
  Synthetic polynucleotide
ugcaggcccaggcugcccgc

SEQ ID NO: 1148 - RNA, 20 nt, Artificial Sequence
  Synthetic polynucleotide
aggcccaggcugcccgccgg

SEQ ID NO: 1149 - RNA, 20 nt, Artificial Sequence
  Synthetic polynucleotide
ugucuuugcccagagcaucc

SEQ ID NO: 1150 - RNA, 20 nt, Artificial Sequence
  Synthetic polynucleotide
ucuuugcccagagcaucccg

SEQ ID NO: 1151 - RNA, 20 nt, Artificial Sequence
  Synthetic polynucleotide
cuuugcccagagcaucccgu

SEQ ID NO: 1152 - RNA, 20 nt, Artificial Sequence
  Synthetic polynucleotide
ccagagcaucccguggaacc

SEQ ID NO: 1153 - RNA, 20 nt, Artificial Sequence
  Synthetic polynucleotide
ccagagcaucccguggaacc

SEQ ID NO: 1154 - RNA, 20 nt, Artificial Sequence
  Synthetic polynucleotide
ccacgggaugcucugggcaa

SEQ ID NO: 1155 - RNA, 20 nt, Artificial Sequence
  Synthetic polynucleotide
uccacgggaugcucugggca

SEQ ID NO: 1156 - RNA, 20 nt, Artificial Sequence
  Synthetic polynucleotide
ccagguuccacgggaugcuc

SEQ ID NO: 1157 - RNA, 20 nt, Artificial Sequence
  Synthetic polynucleotide
cagguuccacgggaugcucu

SEQ ID NO: 1158 - RNA, 20 nt, Artificial Sequence
  Synthetic polynucleotide
ccagguuccacgggaugcuc

SEQ ID NO: 1159 - RNA, 20 nt, Artificial Sequence
  Synthetic polynucleotide
gcggaugaauaccagccccc

SEQ ID NO: 1160 - RNA, 20 nt, Artificial Sequence
  Synthetic polynucleotide
augaauaccagccccccggu

SEQ ID NO: 1161 - RNA, 20 nt, Artificial Sequence
  Synthetic polynucleotide
ugaauaccagccccccggua

SEQ ID NO: 1162 - RNA, 20 nt, Artificial Sequence
  Synthetic polynucleotide
ccagcauacagagugaccac

SEQ ID NO: 1163 - RNA, 20 nt, Artificial Sequence
  Synthetic polynucleotide
cagcauacagagugaccacc

SEQ ID NO: 1164 - RNA, 20 nt, Artificial Sequence
  Synthetic polynucleotide
ccagcauacagagugaccac

SEQ ID NO: 1165 - RNA, 20 nt, Artificial Sequence
  Synthetic polynucleotide
agcauacagagugaccaccg

SEQ ID NO: 1166 - RNA, 20 nt, Artificial Sequence
  Synthetic polynucleotide
cagagugaccaccgggaaau

SEQ ID NO: 1167 - RNA, 20 nt, Artificial Sequence
  Synthetic polynucleotide
agcauacagagugaccaccg

SEQ ID NO: 1168 - RNA, 20 nt, Artificial Sequence
  Synthetic polynucleotide
cuuccacagacagguaagca

SEQ ID NO: 1169 - RNA, 20 nt, Artificial Sequence
  Synthetic polynucleotide
gacagguaagcacggccguc

SEQ ID NO: 1170 - RNA, 20 nt, Artificial Sequence
  Synthetic polynucleotide
cagacagguaagcacggccg

SEQ ID NO: 1171 - RNA, 20 nt, Artificial Sequence
  Synthetic polynucleotide
cgugcucaacugccaaggga

SEQ ID NO: 1172 - RNA, 20 nt, Artificial Sequence
  Synthetic polynucleotide
gugcucaacugccaagggaa

SEQ ID NO: 1173 - RNA, 20 nt, Artificial Sequence
  Synthetic polynucleotide
cgugcucaacugccaaggga

SEQ ID NO: 1174 - RNA, 20 nt, Artificial Sequence
  Synthetic polynucleotide
caacugccaagggaagggca

SEQ ID NO: 1175 - RNA, 20 nt, Artificial Sequence
  Synthetic polynucleotide
ugccaagggaagggcacggu

SEQ ID NO: 1176 - RNA, 20 nt, Artificial Sequence
  Synthetic polynucleotide
gccaagggaagggcacgguu

SEQ ID NO: 1177 - RNA, 20 nt, Artificial Sequence
  Synthetic polynucleotide
caagggaagggcacgguuag

SEQ ID NO: 1178 - RNA, 20 nt, Artificial Sequence
  Synthetic polynucleotide
cucaacugccaagggaaggg

SEQ ID NO: 1179 - RNA, 20 nt, Artificial Sequence
  Synthetic polynucleotide
uucggaaaagccagcugguc

SEQ ID NO: 1180 - RNA, 20 nt, Artificial Sequence
  Synthetic polynucleotide
aaaagccagcugguccagcc

SEQ ID NO: 1181 - RNA, 20 nt, Artificial Sequence
  Synthetic polynucleotide
aagccagcugguccagccug

SEQ ID NO: 1182 - RNA, 20 nt, Artificial Sequence
  Synthetic polynucleotide
aagccagcugguccagccug

SEQ ID NO: 1183 - RNA, 20 nt, Artificial Sequence
  Synthetic polynucleotide
aagccagcugguccagccug

SEQ ID NO: 1184 - RNA, 20 nt, Artificial Sequence
  Synthetic polynucleotide
agccagcugguccagccugu

SEQ ID NO: 1185 - RNA, 20 nt, Artificial Sequence
  Synthetic polynucleotide
gccagcugguccagccugug

SEQ ID NO: 1186 - RNA, 20 nt, Artificial Sequence
  Synthetic polynucleotide
agccagcugguccagccugu

SEQ ID NO: 1187 - RNA, 20 nt, Artificial Sequence
  Synthetic polynucleotide
gguccagccuguggggccac

SEQ ID NO: 1188 - RNA, 20 nt, Artificial Sequence
  Synthetic polynucleotide
guccagccuguggggccacu

SEQ ID NO: 1189 - RNA, 20 nt, Artificial Sequence
  Synthetic polynucleotide
ccagccuguggggccacugg

SEQ ID NO: 1190 - RNA, 20 nt, Artificial Sequence
  Synthetic polynucleotide
cagccuguggggccacuggu

SEQ ID NO: 1191 - RNA, 20 nt, Artificial Sequence
  Synthetic polynucleotide
cugguccagccuguggggcc

SEQ ID NO: 1192 - RNA, 20 nt, Artificial Sequence
  Synthetic polynucleotide
guccagccuguggggccacu

SEQ ID NO: 1193 - RNA, 20 nt, Artificial Sequence
  Synthetic polynucleotide
gguccagccuguggggccac

SEQ ID NO: 1194 - RNA, 20 nt, Artificial Sequence
  Synthetic polynucleotide
ccagccuguggggccacugg

SEQ ID NO: 1195 - RNA, 20 nt, Artificial Sequence
  Synthetic polynucleotide
caacgccgccugccagcgcc

SEQ ID NO: 1196 - RNA, 20 nt, Artificial Sequence
  Synthetic polynucleotide
aacgccgccugccagcgccu

SEQ ID NO: 1197 - RNA, 20 nt, Artificial Sequence
  Synthetic polynucleotide
cgccgccugccagcgccugg

SEQ ID NO: 1198 - RNA, 20 nt, Artificial Sequence
  Synthetic polynucleotide
gccgccugccagcgccuggc

SEQ ID NO: 1199 - RNA, 20 nt, Artificial Sequence
  Synthetic polynucleotide
ccgccugccagcgccuggcg

SEQ ID NO: 1200 - RNA, 20 nt, Artificial Sequence
  Synthetic polynucleotide
cgccugccagcgccuggcga

SEQ ID NO: 1201 - RNA, 20 nt, Artificial Sequence
  Synthetic polynucleotide
ugccagcgccuggcgagggc

SEQ ID NO: 1202 - RNA, 20 nt, Artificial Sequence
  Synthetic polynucleotide
gccagcgccuggcgagggcu

SEQ ID NO: 1203 - RNA, 20 nt, Artificial Sequence
  Synthetic polynucleotide
ccagcgccuggcgagggcug

SEQ ID NO: 1204 - RNA, 20 nt, Artificial Sequence
  Synthetic polynucleotide
ugccagcgccuggcgagggc

SEQ ID NO: 1205 - RNA, 20 nt, Artificial Sequence
  Synthetic polynucleotide
ugccagcgccuggcgagggc

SEQ ID NO: 1206 - RNA, 20 nt, Artificial Sequence
  Synthetic polynucleotide
caccaaugcccaagaccagc

SEQ ID NO: 1207 - RNA, 20 nt, Artificial Sequence
  Synthetic polynucleotide
accaaugcccaagaccagcc

SEQ ID NO: 1208 - RNA, 20 nt, Artificial Sequence
  Synthetic polynucleotide
caaugcccaagaccagccgg

SEQ ID NO: 1209 - RNA, 20 nt, Artificial Sequence
  Synthetic polynucleotide
ccaagaccagccggugaccc

SEQ ID NO: 1210 - RNA, 20 nt, Artificial Sequence
  Synthetic polynucleotide
caagaccagccggugacccu

SEQ ID NO: 1211 - RNA, 21 nt, Artificial Sequence
  Synthetic polynucleotide
caagaccagccggugacccug

SEQ ID NO: 1212 - RNA, 20 nt, Artificial Sequence
  Synthetic polynucleotide
gccaccaaugcccaagacca

SEQ ID NO: 1213 - RNA, 20 nt, Artificial Sequence
  Synthetic polynucleotide
caccaaugcccaagaccagc

SEQ ID NO: 1214 - RNA, 20 nt, Artificial Sequence
  Synthetic polynucleotide
ccaagaccagccggugaccc

SEQ ID NO: 1215 - RNA, 20 nt, Artificial Sequence
  Synthetic polynucleotide
agaccagccggugacccugg

SEQ ID NO: 1216 - RNA, 20 nt, Artificial Sequence
  Synthetic polynucleotide
cugcuuugugucacagagug

SEQ ID NO: 1217 - RNA, 20 nt, Artificial Sequence
  Synthetic polynucleotide
ugucacagagugggacauca

SEQ ID NO: 1218 - RNA, 20 nt, Artificial Sequence
  Synthetic polynucleotide
gucacagagugggacaucac

SEQ ID NO: 1219 - RNA, 20 nt, Artificial Sequence
  Synthetic polynucleotide
acaucacaggcugcugccca

SEQ ID NO: 1220 - RNA, 20 nt, Artificial Sequence
  Synthetic polynucleotide
aucacaggcugcugcccacg

SEQ ID NO: 1221 - RNA, 20 nt, Artificial Sequence
  Synthetic polynucleotide
caggcugcugcccacguggc

SEQ ID NO: 1222 - RNA, 20 nt, Artificial Sequence
  Synthetic polynucleotide
cacaggcugcugcccacgug

SEQ ID NO: 1223 - RNA, 20 nt, Artificial Sequence
  Synthetic polynucleotide
ggccgaguugaggcagagac

SEQ ID NO: 1224 - RNA, 20 nt, Artificial Sequence
  Synthetic polynucleotide
agggaaccaggccucauuga

SEQ ID NO: 1225 - RNA, 20 nt, Artificial Sequence
  Synthetic polynucleotide
cucagggaaccaggccucau

SEQ ID NO: 1226 - RNA, 20 nt, Artificial Sequence
  Synthetic polynucleotide
uccucagggaaccaggccuc

SEQ ID NO: 1227 - RNA, 20 nt, Artificial Sequence
  Synthetic polynucleotide
cccugaggaccagcggguac

SEQ ID NO: 1228 - RNA, 20 nt, Artificial Sequence
  Synthetic polynucleotide
cagcggguacugacccccaa

SEQ ID NO: 1229 - RNA, 20 nt, Artificial Sequence
  Synthetic polynucleotide
cagcugccaaccugcaaaaa

SEQ ID NO: 1230 - RNA, 20 nt, Artificial Sequence
  Synthetic polynucleotide
gccaaccugcaaaaagggcc

SEQ ID NO: 1231 - RNA, 20 nt, Artificial Sequence
  Synthetic polynucleotide
gccaaccugcaaaaagggcc

SEQ ID NO: 1232 - RNA, 20 nt, Artificial Sequence
  Synthetic polynucleotide
acagcugccaaccugcaaaa

SEQ ID NO: 1233 - RNA, 20 nt, Artificial Sequence
  Synthetic polynucleotide
acagcugccaaccugcaaaa

SEQ ID NO: 1234 - RNA, 20 nt, Artificial Sequence
  Synthetic polynucleotide
aacagcugccaaccugcaaa

SEQ ID NO: 1235 - RNA, 20 nt, Artificial Sequence
  Synthetic polynucleotide
gccaaccugcaaaaagggcc

SEQ ID NO: 1236 - RNA, 20 nt, Artificial Sequence
  Synthetic polynucleotide
gcagguuggcagcuguuuug

SEQ ID NO: 1237 - RNA, 20 nt, Artificial Sequence
  Synthetic polynucleotide
cagguuggcagcuguuuugc

SEQ ID NO: 1238 - RNA, 20 nt, Artificial Sequence
  Synthetic polynucleotide
agguuggcagcuguuuugca

SEQ ID NO: 1239 - RNA, 20 nt, Artificial Sequence
  Synthetic polynucleotide
gcagcuguuuugcaggacug

SEQ ID NO: 1240 - RNA, 20 nt, Artificial Sequence
  Synthetic polynucleotide
gaccauacaguccugcaaaa

SEQ ID NO: 1241 - RNA, 20 nt, Artificial Sequence
  Synthetic polynucleotide
uaaggcccaagggggcaagc

SEQ ID NO: 1242 - RNA, 20 nt, Artificial Sequence
  Synthetic polynucleotide
acucuaaggcccaagggggc

SEQ ID NO: 1243 - RNA, 20 nt, Artificial Sequence
  Synthetic polynucleotide
ucuaaggcccaagggggcaa

SEQ ID NO: 1244 - RNA, 20 nt, Artificial Sequence
  Synthetic polynucleotide
cugcuaccccaggccaacug

SEQ ID NO: 1245 - RNA, 20 nt, Artificial Sequence
  Synthetic polynucleotide
ugcuaccccaggccaacugc

SEQ ID NO: 1246 - RNA, 22 nt, Artificial Sequence
  Synthetic polynucleotide
caggccaacugcagcguccaca

SEQ ID NO: 1247 - RNA, 20 nt, Artificial Sequence
  Synthetic polynucleotide
ccaacagggccacguccuca

SEQ ID NO: 1248 - RNA, 20 nt, Artificial Sequence
  Synthetic polynucleotide
caacagggccacguccucac

SEQ ID NO: 1249 - RNA, 20 nt, Artificial Sequence
  Synthetic polynucleotide
cagggccacguccucacagg

SEQ ID NO: 1250 - RNA, 21 nt, Artificial Sequence
  Synthetic polynucleotide
cagggccacguccucacaggu

SEQ ID NO: 1251 - RNA, 20 nt, Artificial Sequence
  Synthetic polynucleotide
accaacagggccacguccuc

SEQ ID NO: 1252 - RNA, 20 nt, Artificial Sequence
  Synthetic polynucleotide
cccagugggagcugcagccu

SEQ ID NO: 1253 - RNA, 20 nt, Artificial Sequence
  Synthetic polynucleotide
ccagugggagcugcagccug

SEQ ID NO: 1254 - RNA, 20 nt, Artificial Sequence
  Synthetic polynucleotide
ucccagugggagcugcagcc

SEQ ID NO: 1255 - RNA, 20 nt, Artificial Sequence
  Synthetic polynucleotide
cccagugggagcugcagccu

SEQ ID NO: 1256 - RNA, 20 nt, Artificial Sequence
  Synthetic polynucleotide
ucccagugggagcugcagcc

SEQ ID NO: 1257 - RNA, 20 nt, Artificial Sequence
  Synthetic polynucleotide
ccaccucccagugggagcug

SEQ ID NO: 1258 - RNA, 20 nt, Artificial Sequence
  Synthetic polynucleotide
ucccagugggagcugcagcc

SEQ ID NO: 1259 - RNA, 20 nt, Artificial Sequence
  Synthetic polynucleotide
ggccacgaggucagcccaac

SEQ ID NO: 1260 - RNA, 20 nt, Artificial Sequence
  Synthetic polynucleotide
gccacgaggucagcccaacc

SEQ ID NO: 1261 - RNA, 20 nt, Artificial Sequence
  Synthetic polynucleotide
cacgaggucagcccaaccag

SEQ ID NO: 1262 - RNA, 20 nt, Artificial Sequence
  Synthetic polynucleotide
cgaggucagcccaaccagug

SEQ ID NO: 1263 - RNA, 20 nt, Artificial Sequence
  Synthetic polynucleotide
gaggccacgaggucagccca

SEQ ID NO: 1264 - RNA, 20 nt, Artificial Sequence
  Synthetic polynucleotide
ggucagcccaaccagugcgu

SEQ ID NO: 1265 - RNA, 20 nt, Artificial Sequence
  Synthetic polynucleotide
aggucagcccaaccagugcg

SEQ ID NO: 1266 - RNA, 20 nt, Artificial Sequence
  Synthetic polynucleotide
ggccacgaggucagcccaac

SEQ ID NO: 1267 - RNA, 20 nt, Artificial Sequence
  Synthetic polynucleotide
gccacgaggucagcccaacc

SEQ ID NO: 1268 - RNA, 20 nt, Artificial Sequence
  Synthetic polynucleotide
cacgaggucagcccaaccag

SEQ ID NO: 1269 - RNA, 20 nt, Artificial Sequence
  Synthetic polynucleotide
cgaggucagcccaaccagug

SEQ ID NO: 1270 - RNA, 20 nt, Artificial Sequence
  Synthetic polynucleotide
aggucagcccaaccagugcg

SEQ ID NO: 1271 - RNA, 20 nt, Artificial Sequence
  Synthetic polynucleotide
ggucagcccaaccagugcgu

SEQ ID NO: 1272 - RNA, 20 nt, Artificial Sequence
  Synthetic polynucleotide
cccaaccagugcgugggcca

SEQ ID NO: 1273 - RNA, 20 nt, Artificial Sequence
  Synthetic polynucleotide
ccagugcgugggccacaggg

SEQ ID NO: 1274 - RNA, 20 nt, Artificial Sequence
  Synthetic polynucleotide
accagugcgugggccacagg

SEQ ID NO: 1275 - RNA, 20 nt, Artificial Sequence
  Synthetic polynucleotide
aaccagugcgugggccacag

SEQ ID NO: 1276 - RNA, 20 nt, Artificial Sequence
  Synthetic polynucleotide
caaccagugcgugggccaca

SEQ ID NO: 1277 - RNA, 20 nt, Artificial Sequence
  Synthetic polynucleotide
ccaaccagugcgugggccac

SEQ ID NO: 1278 - RNA, 20 nt, Artificial Sequence
  Synthetic polynucleotide
caaccagugcgugggccaca

SEQ ID NO: 1279 - RNA, 20 nt, Artificial Sequence
  Synthetic polynucleotide
caggagcaggugaagaggcc

SEQ ID NO: 1280 - RNA, 20 nt, Artificial Sequence
  Synthetic polynucleotide
ccccucaggagcaggugaag

SEQ ID NO: 1281 - RNA, 20 nt, Artificial Sequence
  Synthetic polynucleotide
gccccucaggagcaggugaa

SEQ ID NO: 1282 - RNA, 20 nt, Artificial Sequence
  Synthetic polynucleotide
ggccccucaggagcagguga

SEQ ID NO: 1283 - RNA, 20 nt, Artificial Sequence
  Synthetic polynucleotide
cggccccucaggagcaggug

SEQ ID NO: 1284 - RNA, 20 nt, Artificial Sequence
  Synthetic polynucleotide
cccggccccucaggagcagg

SEQ ID NO: 1285 - RNA, 20 nt, Artificial Sequence
  Synthetic polynucleotide
ggccccucaggagcagguga

SEQ ID NO: 1286 - RNA, 20 nt, Artificial Sequence
  Synthetic polynucleotide
gccccucaggagcaggugaa

SEQ ID NO: 1287 - RNA, 20 nt, Artificial Sequence
  Synthetic polynucleotide
ccccucaggagcaggugaag

SEQ ID NO: 1288 - RNA, 20 nt, Artificial Sequence
  Synthetic polynucleotide
caggagcaggugaagaggcc

SEQ ID NO: 1289 - RNA, 20 nt, Artificial Sequence
  Synthetic polynucleotide
ggagcaggugaagaggcccg

SEQ ID NO: 1290 - RNA, 20 nt, Artificial Sequence
  Synthetic polynucleotide
gagcaggugaagaggcccgu

SEQ ID NO: 1291 - RNA, 20 nt, Artificial Sequence
  Synthetic polynucleotide
agcaggugaagaggcccgug

SEQ ID NO: 1292 - RNA, 21 nt, Artificial Sequence
  Synthetic polynucleotide
caggugaagaggcccgugagg

SEQ ID NO: 1293 - RNA, 20 nt, Artificial Sequence
  Synthetic polynucleotide
ccagcccuccucgcaggcca

SEQ ID NO: 1294 - RNA, 20 nt, Artificial Sequence
  Synthetic polynucleotide
caggguccagcccuccucgc

SEQ ID NO: 1295 - RNA, 20 nt, Artificial Sequence
  Synthetic polynucleotide
ucaggguccagcccuccucg

SEQ ID NO: 1296 - RNA, 20 nt, Artificial Sequence
  Synthetic polynucleotide
guccagcccuccucgcaggc

SEQ ID NO: 1297 - RNA, 20 nt, Artificial Sequence
  Synthetic polynucleotide
ggcaccuggcgcaggccucc

SEQ ID NO: 1298 - RNA, 20 nt, Artificial Sequence
  Synthetic polynucleotide
gcaccuggcgcaggccuccc

SEQ ID NO: 1299 - RNA, 20 nt, Artificial Sequence
  Synthetic polynucleotide
caccuggcgcaggccuccca

SEQ ID NO: 1300 - RNA, 20 nt, Artificial Sequence
  Synthetic polynucleotide
accuggcgcaggccucccag

SEQ ID NO: 1301 - RNA, 20 nt, Artificial Sequence
  Synthetic polynucleotide
cgcaggccucccaggagcuc

SEQ ID NO: 1302 - RNA, 20 nt, Artificial Sequence
  Synthetic polynucleotide
gcaggccucccaggagcucc

SEQ ID NO: 1303 - RNA, 21 nt, Artificial Sequence
  Synthetic polynucleotide
caggccucccaggagcuccag

SEQ ID NO: 1304 - RNA, 20 nt, Artificial Sequence
  Synthetic polynucleotide
ggcgcaggccucccaggagc

SEQ ID NO: 1305 - RNA, 19 nt, Artificial Sequence
  Synthetic polynucleotide
gcaccuggcgcaggccucc

SEQ ID NO: 1306 - RNA, 20 nt, Artificial Sequence
  Synthetic polynucleotide
ccucccaggagcuccaguga

SEQ ID NO: 1307 - RNA, 20 nt, Artificial Sequence
  Synthetic polynucleotide
aggccucccaggagcuccag

SEQ ID NO: 1308 - RNA, 20 nt, Artificial Sequence
  Synthetic polynucleotide
gcaggccucccaggagcucc

SEQ ID NO: 1309 - RNA, 20 nt, Artificial Sequence
  Synthetic polynucleotide
cgcaggccucccaggagcuc

SEQ ID NO: 1310 - RNA, 20 nt, Artificial Sequence
  Synthetic polynucleotide
gaccaccgggaaaucgaggg

SEQ ID NO: 1311 - RNA, 20 nt, Artificial Sequence
  Synthetic polynucleotide
gaccaccgggaaaucgaggg

SEQ ID NO: 1312 - RNA, 20 nt, Artificial Sequence
  Synthetic polynucleotide
gucagcggccgggaugccgg

SEQ ID NO: 1313 - RNA, 20 nt, Artificial Sequence
  Synthetic polynucleotide
gaccaccgggaaaucgaggg

SEQ ID NO: 1314 - RNA, 20 nt, Artificial Sequence
  Synthetic polynucleotide
gcgcgugcucaacugccaag

SEQ ID NO: 1315 - RNA, 20 nt, Artificial Sequence
  Synthetic polynucleotide
ucgucgagcaggccagcaag

SEQ ID NO: 1316 - RNA, 20 nt, Artificial Sequence
  Synthetic polynucleotide
gcuagccuugcguuccgagg

SEQ ID NO: 1317 - RNA, 20 nt, Artificial Sequence
  Synthetic polynucleotide
cgcaccuuggcgcagcggug

SEQ ID NO: 1318 - RNA, 20 nt, Artificial Sequence
  Synthetic polynucleotide
ggaaucccggccccucagga

SEQ ID NO: 1319 - RNA, 20 nt, Artificial Sequence
  Synthetic polynucleotide
agugaccaccgggaaaucga

SEQ ID NO: 1320 - RNA, 20 nt, Artificial Sequence
  Synthetic polynucleotide
agugaccaccgggaaaucga

SEQ ID NO: 1321 - RNA, 20 nt, Artificial Sequence
  Synthetic polynucleotide
accaccgggaaaucgagggc

SEQ ID NO: 1322 - RNA, 20 nt, Artificial Sequence
  Synthetic polynucleotide
gggcggccaccagguugggg

SEQ ID NO: 1323 - RNA, 21 nt, Artificial Sequence
  Synthetic polynucleotide
cgcuaaccgugcccuucccuu

SEQ ID NO: 1324 - RNA, 20 nt, Artificial Sequence
  Synthetic polynucleotide
acggugcccaugagggccag

SEQ ID NO: 1325 - RNA, 20 nt, Artificial Sequence
  Synthetic polynucleotide
ggccugcucgacgaacacaa

SEQ ID NO: 1326 - RNA, 20 nt, Artificial Sequence
  Synthetic polynucleotide
ugcuagccuugcguuccgag

SEQ ID NO: 1327 - RNA, 20 nt, Artificial Sequence
  Synthetic polynucleotide
ccgcaccuuggcgcagcggu

SEQ ID NO: 1328 - RNA, 20 nt, Artificial Sequence
  Synthetic polynucleotide
caccuuggcgcagcggugga

SEQ ID NO: 1329 - RNA, 20 nt, Artificial Sequence
  Synthetic polynucleotide
ucauggcacccaccuggcag

SEQ ID NO: 1330 - RNA, 20 nt, Artificial Sequence
  Synthetic polynucleotide
cgggaugccggcguggccaa

SEQ ID NO: 1331 - RNA, 20 nt, Artificial Sequence
  Synthetic polynucleotide
cgggaugccggcguggccaa

SEQ ID NO: 1332 - RNA, 20 nt, Artificial Sequence
  Synthetic polynucleotide
cacaggcugcugcccacgug

SEQ ID NO: 1333 - RNA, 20 nt, Artificial Sequence
  Synthetic polynucleotide
agucauggcacccaccuggc

SEQ ID NO: 1334 - RNA, 20 nt, Artificial Sequence
  Synthetic polynucleotide
acacuugcuggccugcucga

SEQ ID NO: 1335 - RNA, 20 nt, Artificial Sequence
  Synthetic polynucleotide
gugcuagccuugcguuccga

SEQ ID NO: 1336 - RNA, 20 nt, Artificial Sequence
  Synthetic polynucleotide
ggcugcugcccacguggcug

SEQ ID NO: 1337 - RNA, 20 nt, Artificial Sequence
  Synthetic polynucleotide
cccgcaccuuggcgcagcgg

SEQ ID NO: 1338 - RNA, 20 nt, Artificial Sequence
  Synthetic polynucleotide
gagugaccaccgggaaaucg

SEQ ID NO: 1339 - RNA, 20 nt, Artificial Sequence
  Synthetic polynucleotide
gagugaccaccgggaaaucg

SEQ ID NO: 1340 - RNA, 20 nt, Artificial Sequence
  Synthetic polynucleotide
gccguccuccucggaacgca

SEQ ID NO: 1341 - RNA, 20 nt, Artificial Sequence
  Synthetic polynucleotide
cccgcgggcgcccgugcgca

SEQ ID NO: 1342 - RNA, 20 nt, Artificial Sequence
  Synthetic polynucleotide
caccuuggcgcagcggugga

SEQ ID NO: 1343 - RNA, 20 nt, Artificial Sequence
  Synthetic polynucleotide
uggccgaagcacccgagcac

SEQ ID NO: 1344 - RNA, 20 nt, Artificial Sequence
  Synthetic polynucleotide
agucauggcacccaccuggc

SEQ ID NO: 1345 - RNA, 20 nt, Artificial Sequence
  Synthetic polynucleotide
accaccgggaaaucgagggc

SEQ ID NO: 1346 - RNA, 20 nt, Artificial Sequence
  Synthetic polynucleotide
ccaccgggaaaucgagggca

SEQ ID NO: 1347 - RNA, 20 nt, Artificial Sequence
  Synthetic polynucleotide
gcagucgcuggaggcaccaa

SEQ ID NO: 1348 - RNA, 20 nt, Artificial Sequence
  Synthetic polynucleotide
cgggaugccggcguggccaa

SEQ ID NO: 1349 - RNA, 20 nt, Artificial Sequence
  Synthetic polynucleotide
cgggaugccggcguggccaa

SEQ ID NO: 1350 - RNA, 20 nt, Artificial Sequence
  Synthetic polynucleotide
gccuugcguuccgaggagga

SEQ ID NO: 1351 - RNA, 20 nt, Artificial Sequence
  Synthetic polynucleotide
gccuugcguuccgaggagga

SEQ ID NO: 1352 - RNA, 20 nt, Artificial Sequence
  Synthetic polynucleotide
gccuugcguuccgaggagga

SEQ ID NO: 1353 - RNA, 20 nt, Artificial Sequence
  Synthetic polynucleotide
cuggccgaagcacccgagca

SEQ ID NO: 1354 - RNA, 20 nt, Artificial Sequence
  Synthetic polynucleotide
ucggaacgcaaggcuagcac

SEQ ID NO: 1355 - RNA, 21 nt, Artificial Sequence
  Synthetic polynucleotide
cgugcgcaggaggacgaggac

SEQ ID NO: 1356 - RNA, 20 nt, Artificial Sequence
  Synthetic polynucleotide
gccaaccugcaaaaagggcc

SEQ ID NO: 1357 - RNA, 20 nt, Artificial Sequence
  Synthetic polynucleotide
cgggaaaucgagggcagggu

SEQ ID NO: 1358 - RNA, 20 nt, Artificial Sequence
  Synthetic polynucleotide
gggcagggcggccaccaggu

SEQ ID NO: 1359 - RNA, 20 nt, Artificial Sequence
  Synthetic polynucleotide
uggucagcggccgggaugcc

SEQ ID NO: 1360 - RNA, 20 nt, Artificial Sequence
  Synthetic polynucleotide
uggucagcggccgggaugcc

SEQ ID NO: 1361 - RNA, 20 nt, Artificial Sequence
  Synthetic polynucleotide
gcguuccgaggaggacggcc

SEQ ID NO: 1362 - RNA, 20 nt, Artificial Sequence
  Synthetic polynucleotide
gcguuccgaggaggacggcc

SEQ ID NO: 1363 - RNA, 20 nt, Artificial Sequence
  Synthetic polynucleotide
ucgagcaggccagcaagugu

SEQ ID NO: 1364 - RNA, 20 nt, Artificial Sequence
  Synthetic polynucleotide
ggcagggcggccaccagguu

SEQ ID NO: 1365 - RNA, 20 nt, Artificial Sequence
  Synthetic polynucleotide
cgugcucaacugccaaggga

SEQ ID NO: 1366 - RNA, 20 nt, Artificial Sequence
  Synthetic polynucleotide
gcgcagcgguggaagguggc

SEQ ID NO: 1367 - RNA, 20 nt, Artificial Sequence
  Synthetic polynucleotide
gcgggcgcccgugcgcagga

SEQ ID NO: 1368 - RNA, 20 nt, Artificial Sequence
  Synthetic polynucleotide
uggccugcucgacgaacaca

SEQ ID NO: 1369 - RNA, 20 nt, Artificial Sequence
  Synthetic polynucleotide
ggccguccuccucggaacgc

SEQ ID NO: 1370 - RNA, 20 nt, Artificial Sequence
  Synthetic polynucleotide
agcgcacugcccgccgccug

SEQ ID NO: 1371 - RNA, 20 nt, Artificial Sequence
  Synthetic polynucleotide
gcgugcucaacugccaaggg

SEQ ID NO: 1372 - RNA, 20 nt, Artificial Sequence
  Synthetic polynucleotide
agcaucccguggaaccugga

SEQ ID NO: 1373 - RNA, 20 nt, Artificial Sequence
  Synthetic polynucleotide
gcccgugcgcaggaggacga

SEQ ID NO: 1374 - RNA, 20 nt, Artificial Sequence
  Synthetic polynucleotide
ggcgcccgugcgcaggagga

SEQ ID NO: 1375 - RNA, 20 nt, Artificial Sequence
  Synthetic polynucleotide
gugcugcagucgcuggaggc

SEQ ID NO: 1376 - RNA, 20 nt, Artificial Sequence
  Synthetic polynucleotide
agagcaucccguggaaccug

SEQ ID NO: 1377 - RNA, 20 nt, Artificial Sequence
  Synthetic polynucleotide
cgugcgcaggaggacgagga

SEQ ID NO: 1378 - RNA, 20 nt, Artificial Sequence
  Synthetic polynucleotide
cagcggccgggaugccggcg

SEQ ID NO: 1379 - RNA, 20 nt, Artificial Sequence
  Synthetic polynucleotide
cagcggccgggaugccggcg

SEQ ID NO: 1380 - RNA, 20 nt, Artificial Sequence
  Synthetic polynucleotide
gcagcaccugcuuuguguca

SEQ ID NO: 1381 - RNA, 20 nt, Artificial Sequence
  Synthetic polynucleotide
gcagcaccugcuuuguguca

SEQ ID NO: 1382 - RNA, 20 nt, Artificial Sequence
  Synthetic polynucleotide
aaagcaggugcugcagucgc

SEQ ID NO: 1383 - RNA, 20 nt, Artificial Sequence
  Synthetic polynucleotide
aaagcaggugcugcagucgc

SEQ ID NO: 1384 - RNA, 20 nt, Artificial Sequence
  Synthetic polynucleotide
cuggccugcucgacgaacac

SEQ ID NO: 1385 - RNA, 20 nt, Artificial Sequence
  Synthetic polynucleotide
accuuggcgcagcgguggaa

SEQ ID NO: 1386 - RNA, 20 nt, Artificial Sequence
  Synthetic polynucleotide
cggugcccaugagggccagg

SEQ ID NO: 1387 - RNA, 20 nt, Artificial Sequence
  Synthetic polynucleotide
agcggccaccaggaccgccu

SEQ ID NO: 1388 - RNA, 20 nt, Artificial Sequence
  Synthetic polynucleotide
ggcagggcggccaccagguu

SEQ ID NO: 1389 - RNA, 20 nt, Artificial Sequence
  Synthetic polynucleotide
cgugcucgggugcuucggcc

SEQ ID NO: 1390 - RNA, 20 nt, Artificial Sequence
  Synthetic polynucleotide
ccaccgggaaaucgagggca

SEQ ID NO: 1391 - RNA, 20 nt, Artificial Sequence
  Synthetic polynucleotide
acggccuggccgaagcaccc

SEQ ID NO: 1392 - RNA, 20 nt, Artificial Sequence
  Synthetic polynucleotide
ugcgcgugcucaacugccaa

SEQ ID NO: 1393 - RNA, 20 nt, Artificial Sequence
  Synthetic polynucleotide
acgggcgcccgcgggaccca

SEQ ID NO: 1394 - RNA, 20 nt, Artificial Sequence
  Synthetic polynucleotide
aucacaggcugcugcccacg

SEQ ID NO: 1395 - RNA, 20 nt, Artificial Sequence
  Synthetic polynucleotide
cacgggcgcccgcgggaccc

SEQ ID NO: 1396 - RNA, 20 nt, Artificial Sequence
  Synthetic polynucleotide
gccgggaugccggcguggcc

SEQ ID NO: 1397 - RNA, 20 nt, Artificial Sequence
  Synthetic polynucleotide
gccgggaugccggcguggcc

SEQ ID NO: 1398 - RNA, 20 nt, Artificial Sequence
  Synthetic polynucleotide
gugcccaugagggccagggg

SEQ ID NO: 1399 - RNA, 20 nt, Artificial Sequence
  Synthetic polynucleotide
ccgguggucacucuguaugc

SEQ ID NO: 1400 - RNA, 20 nt, Artificial Sequence
  Synthetic polynucleotide
guggucagcggccgggaugc

SEQ ID NO: 1401 - RNA, 20 nt, Artificial Sequence
  Synthetic polynucleotide
cgcccgugcgcaggaggacg

SEQ ID NO: 1402 - RNA, 20 nt, Artificial Sequence
  Synthetic polynucleotide
ccagagcaucccguggaacc

SEQ ID NO: 1403 - RNA, 20 nt, Artificial Sequence
  Synthetic polynucleotide
acggugcccaugagggccag

SEQ ID NO: 1404 - RNA, 20 nt, Artificial Sequence
  Synthetic polynucleotide
cuaggagauacaccuccacc

SEQ ID NO: 1405 - RNA, 20 nt, Artificial Sequence
  Synthetic polynucleotide
cagagugaccaccgggaaau

SEQ ID NO: 1406 - RNA, 20 nt, Artificial Sequence
  Synthetic polynucleotide
ccaaccugcaaaaagggccu

SEQ ID NO: 1407 - RNA, 20 nt, Artificial Sequence
  Synthetic polynucleotide
gguauccccggcgggcagcc

SEQ ID NO: 1408 - RNA, 20 nt, Artificial Sequence
  Synthetic polynucleotide
gcgcccgugcgcaggaggac

SEQ ID NO: 1409 - RNA, 20 nt, Artificial Sequence
  Synthetic polynucleotide
cuuggcgcagcgguggaagg

SEQ ID NO: 1410 - RNA, 20 nt, Artificial Sequence
  Synthetic polynucleotide
guauccccggcgggcagccu

SEQ ID NO: 1411 - RNA, 20 nt, Artificial Sequence
  Synthetic polynucleotide
gacggccuggccgaagcacc

SEQ ID NO: 1412 - RNA, 20 nt, Artificial Sequence
  Synthetic polynucleotide
cugcgcgugcucaacugcca

SEQ ID NO: 1413 - RNA, 20 nt, Artificial Sequence
  Synthetic polynucleotide
aagcaggugcugcagucgcu

SEQ ID NO: 1414 - RNA, 20 nt, Artificial Sequence
  Synthetic polynucleotide
aagcaggugcugcagucgcu

SEQ ID NO: 1415 - RNA, 20 nt, Artificial Sequence
  Synthetic polynucleotide
aagcaggugcugcagucgcu

SEQ ID NO: 1416 - RNA, 20 nt, Artificial Sequence
  Synthetic polynucleotide
cccuggcggguggguacagc

SEQ ID NO: 1417 - RNA, 20 nt, Artificial Sequence
  Synthetic polynucleotide
cugcagucgcuggaggcacc

SEQ ID NO: 1418 - RNA, 20 nt, Artificial Sequence
  Synthetic polynucleotide
ugacggugcccaugagggcc

SEQ ID NO: 1419 - RNA, 20 nt, Artificial Sequence
  Synthetic polynucleotide
gccaaccugcaaaaagggcc

SEQ ID NO: 1420 - RNA, 20 nt, Artificial Sequence
  Synthetic polynucleotide
gguuccgugcucgggugcuu

SEQ ID NO: 1421 - RNA, 20 nt, Artificial Sequence
  Synthetic polynucleotide
aaagcaggugcugcagucgc

SEQ ID NO: 1422 - RNA, 20 nt, Artificial Sequence
  Synthetic polynucleotide
aaagcaggugcugcagucgc

SEQ ID NO: 1423 - RNA, 20 nt, Artificial Sequence
  Synthetic polynucleotide
cgguggucacucuguaugcu

SEQ ID NO: 1424 - RNA, 20 nt, Artificial Sequence
  Synthetic polynucleotide
ccgugcucgggugcuucggc

SEQ ID NO: 1425 - RNA, 20 nt, Artificial Sequence
  Synthetic polynucleotide
gacggugcccaugagggcca

SEQ ID NO: 1426 - RNA, 20 nt, Artificial Sequence
  Synthetic polynucleotide
cagagcaucccguggaaccu

SEQ ID NO: 1427 - RNA, 20 nt, Artificial Sequence
  Synthetic polynucleotide
gugcucaacugccaagggaa

SEQ ID NO: 1428 - RNA, 20 nt, Artificial Sequence
  Synthetic polynucleotide
ccagagcaucccguggaacc

SEQ ID NO: 1429 - RNA, 20 nt, Artificial Sequence
  Synthetic polynucleotide
cagcggccaccaggaccgcc

SEQ ID NO: 1430 - RNA, 20 nt, Artificial Sequence
  Synthetic polynucleotide
cagcggccaccaggaccgcc

SEQ ID NO: 1431 - RNA, 20 nt, Artificial Sequence
  Synthetic polynucleotide
cacgggcgcccgcgggaccc

SEQ ID NO: 1432 - RNA, 20 nt, Artificial Sequence
  Synthetic polynucleotide
cagcaccugcuuugugucac

SEQ ID NO: 1433 - RNA, 20 nt, Artificial Sequence
  Synthetic polynucleotide
cagcaccugcuuugugucac

SEQ ID NO: 1434 - RNA, 20 nt, Artificial Sequence
  Synthetic polynucleotide
ccgguggucacucuguaugc

SEQ ID NO: 1435 - RNA, 20 nt, Artificial Sequence
  Synthetic polynucleotide
cgcuaaccgugcccuucccu

SEQ ID NO: 1436 - RNA, 20 nt, Artificial Sequence
  Synthetic polynucleotide
cuagccuugcguuccgagga

SEQ ID NO: 1437 - RNA, 20 nt, Artificial Sequence
  Synthetic polynucleotide
aaucccggccccucaggagc

SEQ ID NO: 1438 - RNA, 20 nt, Artificial Sequence
  Synthetic polynucleotide
auuaccccuccacgguaccg

SEQ ID NO: 1439 - RNA, 20 nt, Artificial Sequence
  Synthetic polynucleotide
uuaccccuccacgguaccgg

SEQ ID NO: 1440 - RNA, 20 nt, Artificial Sequence
  Synthetic polynucleotide
gccccaugucgacuacaucg

SEQ ID NO: 1441 - RNA, 20 nt, Artificial Sequence
  Synthetic polynucleotide
gccccaugucgacuacaucg

SEQ ID NO: 1442 - RNA, 20 nt, Artificial Sequence
  Synthetic polynucleotide
cgaggucagcccaaccagug

SEQ ID NO: 1443 - RNA, 20 nt, Artificial Sequence
  Synthetic polynucleotide
gccacgaggucagcccaacc

SEQ ID NO: 1444 - RNA, 20 nt, Artificial Sequence
  Synthetic polynucleotide
cgagccggagcucacccugg

SEQ ID NO: 1445 - RNA, 20 nt, Artificial Sequence
  Synthetic polynucleotide
guugccuggcaccuacgugg

SEQ ID NO: 1446 - RNA, 20 nt, Artificial Sequence
  Synthetic polynucleotide
cacgaggucagcccaaccag

SEQ ID NO: 1447 - RNA, 20 nt, Artificial Sequence
  Synthetic polynucleotide
agcacccgagcacggaacca

SEQ ID NO: 1448 - RNA, 20 nt, Artificial Sequence
  Synthetic polynucleotide
gagcaucccguggaaccugg

SEQ ID NO: 1449 - RNA, 20 nt, Artificial Sequence
  Synthetic polynucleotide
cccuccacgguaccgggcgg

SEQ ID NO: 1450 - RNA, 20 nt, Artificial Sequence
  Synthetic polynucleotide
ugccccccagcacccauggg

SEQ ID NO: 1451 - RNA, 20 nt, Artificial Sequence
  Synthetic polynucleotide
gcaguugagcacgcgcaggc

SEQ ID NO: 1452 - RNA, 20 nt, Artificial Sequence
  Synthetic polynucleotide
acccucacccccaaaagcgu

SEQ ID NO: 1453 - RNA, 20 nt, Artificial Sequence
  Synthetic polynucleotide
gaggccacgaggucagccca

SEQ ID NO: 1454 - RNA, 20 nt, Artificial Sequence
  Synthetic polynucleotide
guugccuggcaccuacgugg

SEQ ID NO: 1455 - RNA, 20 nt, Artificial Sequence
  Synthetic polynucleotide
uaccccuccacgguaccggg

SEQ ID NO: 1456 - RNA, 20 nt, Artificial Sequence
  Synthetic polynucleotide
ccuccacgguaccgggcgga

SEQ ID NO: 1457 - RNA, 20 nt, Artificial Sequence
  Synthetic polynucleotide
ggugcugcugccccuggcgg

SEQ ID NO: 1458 - RNA, 20 nt, Artificial Sequence
  Synthetic polynucleotide
ggaaucccggccccucagga

SEQ ID NO: 1459 - RNA, 20 nt, Artificial Sequence
  Synthetic polynucleotide
ccuggggcauggcagcagga

SEQ ID NO: 1460 - RNA, 20 nt, Artificial Sequence
  Synthetic polynucleotide
cacacguguugucuacggcg

SEQ ID NO: 1461 - RNA, 20 nt, Artificial Sequence
  Synthetic polynucleotide
ccccaacugugaugaccugg

SEQ ID NO: 1462 - RNA, 20 nt, Artificial Sequence
  Synthetic polynucleotide
cugggucccgcgggcgcccg

SEQ ID NO: 1463 - RNA, 20 nt, Artificial Sequence
  Synthetic polynucleotide
caccuuggcgcagcggugga

SEQ ID NO: 1464 - RNA, 20 nt, Artificial Sequence
  Synthetic polynucleotide
acacucggggccuacacgga

SEQ ID NO: 1465 - RNA, 20 nt, Artificial Sequence
  Synthetic polynucleotide
agguugccuggcaccuacgu

SEQ ID NO: 1466 - RNA, 20 nt, Artificial Sequence
  Synthetic polynucleotide
uccaccagcugaggccagca

SEQ ID NO: 1467 - RNA, 20 nt, Artificial Sequence
  Synthetic polynucleotide
ccuuggcaguugagcacgcg

SEQ ID NO: 1468 - RNA, 20 nt, Artificial Sequence
  Synthetic polynucleotide
agguugccuggcaccuacgu

SEQ ID NO: 1469 - RNA, 20 nt, Artificial Sequence
  Synthetic polynucleotide
acacuugcuggccugcucga

SEQ ID NO: 1470 - RNA, 20 nt, Artificial Sequence
  Synthetic polynucleotide
cauggcacccaccuggcagg

SEQ ID NO: 1471 - RNA, 20 nt, Artificial Sequence
  Synthetic polynucleotide
caugccccaggucuggaaug

SEQ ID NO: 1472 - RNA, 20 nt, Artificial Sequence
  Synthetic polynucleotide
ggucagcccaaccagugcgu

SEQ ID NO: 1473 - RNA, 20 nt, Artificial Sequence
  Synthetic polynucleotide
cuuggcaguugagcacgcgc

SEQ ID NO: 1474 - RNA, 20 nt, Artificial Sequence
  Synthetic polynucleotide
gcagcaccuggcaauggcgu

SEQ ID NO: 1475 - RNA, 20 nt, Artificial Sequence
  Synthetic polynucleotide
cccgcgggcgcccgugcgca

SEQ ID NO: 1476 - RNA, 20 nt, Artificial Sequence
  Synthetic polynucleotide
gagguugccuggcaccuacg

SEQ ID NO: 1477 - RNA, 20 nt, Artificial Sequence
  Synthetic polynucleotide
gucccgcgggcgcccgugcg

SEQ ID NO: 1478 - RNA, 20 nt, Artificial Sequence
  Synthetic polynucleotide
caccuuggcgcagcggugga

SEQ ID NO: 1479 - RNA, 20 nt, Artificial Sequence
  Synthetic polynucleotide
ccccagccucagcucccgag

SEQ ID NO: 1480 - RNA, 20 nt, Artificial Sequence
  Synthetic polynucleotide
uggccgaagcacccgagcac

SEQ ID NO: 1481 - RNA, 20 nt, Artificial Sequence
  Synthetic polynucleotide
uugccuggcaccuacguggu

SEQ ID NO: 1482 - RNA, 21 nt, Artificial Sequence
  Synthetic polynucleotide
ccccccgguaagacccccauc

SEQ ID NO: 1483 - RNA, 20 nt, Artificial Sequence
  Synthetic polynucleotide
agguccacacagcggccaaa

SEQ ID NO: 1484 - RNA, 20 nt, Artificial Sequence
  Synthetic polynucleotide
uggagguugccuggcaccua

SEQ ID NO: 1485 - RNA, 20 nt, Artificial Sequence
  Synthetic polynucleotide
gaaugugcccgaggaggacg

SEQ ID NO: 1486 - RNA, 20 nt, Artificial Sequence
  Synthetic polynucleotide
ccagccuguggggccacugg

SEQ ID NO: 1487 - RNA, 20 nt, Artificial Sequence
  Synthetic polynucleotide
ccgcugaccaccccugccag

SEQ ID NO: 1488 - RNA, 20 nt, Artificial Sequence
  Synthetic polynucleotide
ggcgcuggcaggcggcguug

SEQ ID NO: 1489 - RNA, 20 nt, Artificial Sequence
  Synthetic polynucleotide
cagcggccaaaguugguccc

SEQ ID NO: 1490 - RNA, 20 nt, Artificial Sequence
  Synthetic polynucleotide
cccacucugugacacaaagc

SEQ ID NO: 1491 - RNA, 20 nt, Artificial Sequence
  Synthetic polynucleotide
cuggcaggcggcguugagga

SEQ ID NO: 1492 - RNA, 20 nt, Artificial Sequence
  Synthetic polynucleotide
cagccucagcucccgaggua

SEQ ID NO: 1493 - RNA, 20 nt, Artificial Sequence
  Synthetic polynucleotide
gaagcgggucccguccuccu

SEQ ID NO: 1494 - RNA, 20 nt, Artificial Sequence
  Synthetic polynucleotide
gcugaccaccccugccaggu

SEQ ID NO: 1495 - RNA, 20 nt, Artificial Sequence
  Synthetic polynucleotide
cggcuguacccacccgccag

SEQ ID NO: 1496 - RNA, 20 nt, Artificial Sequence
  Synthetic polynucleotide
gcgcuggcaggcggcguuga

SEQ ID NO: 1497 - RNA, 20 nt, Artificial Sequence
  Synthetic polynucleotide
ucagcucccgagguaggugc

SEQ ID NO: 1498 - RNA, 20 nt, Artificial Sequence
  Synthetic polynucleotide
acacguguugucuacggcgu

SEQ ID NO: 1499 - RNA, 20 nt, Artificial Sequence
  Synthetic polynucleotide
guagaggcaggcaucguccc

SEQ ID NO: 1500 - RNA, 20 nt, Artificial Sequence
  Synthetic polynucleotide
aagaccagccggugacccug

SEQ ID NO: 1501 - RNA, 20 nt, Artificial Sequence
  Synthetic polynucleotide
aucuggggcgcagcgggcga

SEQ ID NO: 1502 - RNA, 20 nt, Artificial Sequence
  Synthetic polynucleotide
gcgcagcgguggaagguggc

SEQ ID NO: 1503 - RNA, 20 nt, Artificial Sequence
  Synthetic polynucleotide
uugccccaugucgacuacau

SEQ ID NO: 1504 - RNA, 20 nt, Artificial Sequence
  Synthetic polynucleotide
gcagauggcaacggcuguca

SEQ ID NO: 1505 - RNA, 20 nt, Artificial Sequence
  Synthetic polynucleotide
ugaauaccagccccccggua

SEQ ID NO: 1506 - RNA, 20 nt, Artificial Sequence
  Synthetic polynucleotide
uugccccaggggaggacauc

SEQ ID NO: 1507 - RNA, 20 nt, Artificial Sequence
  Synthetic polynucleotide
ccucacccccaaaagcguug

SEQ ID NO: 1508 - RNA, 20 nt, Artificial Sequence
  Synthetic polynucleotide
uagcaggcagcaccuggcaa

SEQ ID NO: 1509 - RNA, 20 nt, Artificial Sequence
  Synthetic polynucleotide
aggucagcccaaccagugcg

SEQ ID NO: 1510 - RNA, 20 nt, Artificial Sequence
  Synthetic polynucleotide
gagguugccuggcaccuacg

SEQ ID NO: 1511 - RNA, 20 nt, Artificial Sequence
  Synthetic polynucleotide
ggauuaccccuccacgguac

SEQ ID NO: 1512 - RNA, 20 nt, Artificial Sequence
  Synthetic polynucleotide
ggcugccuccgucuuuccaa

SEQ ID NO: 1513 - RNA, 20 nt, Artificial Sequence
  Synthetic polynucleotide
gccccaggggaggacaucau

SEQ ID NO: 1514 - RNA, 20 nt, Artificial Sequence
  Synthetic polynucleotide
gcggguacugacccccaacc

SEQ ID NO: 1515 - RNA, 20 nt, Artificial Sequence
  Synthetic polynucleotide
ugcuaccccaggccaacugc

SEQ ID NO: 1516 - RNA, 20 nt, Artificial Sequence
  Synthetic polynucleotide
gcugucacggccccuucgcu

SEQ ID NO: 1517 - RNA, 20 nt, Artificial Sequence
  Synthetic polynucleotide
guccagccuguggggccacu

SEQ ID NO: 1518 - RNA, 20 nt, Artificial Sequence
  Synthetic polynucleotide
cuguacccacccgccagggg

SEQ ID NO: 1519 - RNA, 20 nt, Artificial Sequence
  Synthetic polynucleotide
agcaggcagcaccuggcaau

SEQ ID NO: 1520 - RNA, 20 nt, Artificial Sequence
  Synthetic polynucleotide
gauguccuccccuggggcaa

SEQ ID NO: 1521 - RNA, 20 nt, Artificial Sequence
  Synthetic polynucleotide
ccccaugucgacuacaucga

SEQ ID NO: 1522 - RNA, 20 nt, Artificial Sequence
  Synthetic polynucleotide
aagcgggucccguccuccuc

SEQ ID NO: 1523 - RNA, 20 nt, Artificial Sequence
  Synthetic polynucleotide
gccugguucccugaggacca

SEQ ID NO: 1524 - RNA, 20 nt, Artificial Sequence
  Synthetic polynucleotide
gacuacacacguguugucua

SEQ ID NO: 1525 - RNA, 20 nt, Artificial Sequence
  Synthetic polynucleotide
ccaacugugaugaccuggaa

SEQ ID NO: 1526 - RNA, 20 nt, Artificial Sequence
  Synthetic polynucleotide
uaccugccccaugggugcug

SEQ ID NO: 1527 - RNA, 20 nt, Artificial Sequence
  Synthetic polynucleotide
accuuggcgcagcgguggaa

SEQ ID NO: 1528 - RNA, 20 nt, Artificial Sequence
  Synthetic polynucleotide
ucccgcgggcgcccgugcgc

SEQ ID NO: 1529 - RNA, 20 nt, Artificial Sequence
  Synthetic polynucleotide
accccuccacgguaccgggc

SEQ ID NO: 1530 - RNA, 20 nt, Artificial Sequence
  Synthetic polynucleotide
cugguccagccuguggggcc

SEQ ID NO: 1531 - RNA, 20 nt, Artificial Sequence
  Synthetic polynucleotide
gcccugccccccagcaccca

SEQ ID NO: 1532 - RNA, 20 nt, Artificial Sequence
  Synthetic polynucleotide
ggcgcagcgggcgacggcug

SEQ ID NO: 1533 - RNA, 20 nt, Artificial Sequence
  Synthetic polynucleotide
ggggcauggcagcaggaagc

SEQ ID NO: 1534 - RNA, 20 nt, Artificial Sequence
  Synthetic polynucleotide
gauuaccccuccacgguacc

SEQ ID NO: 1535 - RNA, 20 nt, Artificial Sequence
  Synthetic polynucleotide
cuucccuuggcaguugagca

SEQ ID NO: 1536 - RNA, 20 nt, Artificial Sequence
  Synthetic polynucleotide
cuucccuuggcaguugagca

SEQ ID NO: 1537 - RNA, 20 nt, Artificial Sequence
  Synthetic polynucleotide
ggcccacgcacugguugggc

SEQ ID NO: 1538 - RNA, 20 nt, Artificial Sequence
  Synthetic polynucleotide
guggugcugcugccccuggc

SEQ ID NO: 1539 - RNA, 20 nt, Artificial Sequence
  Synthetic polynucleotide
cgcggcuguacccacccgcc

SEQ ID NO: 1540 - RNA, 20 nt, Artificial Sequence
  Synthetic polynucleotide
ccccaggggaggacaucauu

SEQ ID NO: 1541 - RNA, 20 nt, Artificial Sequence
  Synthetic polynucleotide
ccgccugugcugaggccacg

SEQ ID NO: 1542 - RNA, 20 nt, Artificial Sequence
  Synthetic polynucleotide
ucagcucccgagguaggugc

SEQ ID NO: 1543 - RNA, 20 nt, Artificial Sequence
  Synthetic polynucleotide
guccagccuguggggccacu

SEQ ID NO: 1544 - RNA, 20 nt, Artificial Sequence
  Synthetic polynucleotide
ggggcgcagcgggcgacggc

SEQ ID NO: 1545 - RNA, 20 nt, Artificial Sequence
  Synthetic polynucleotide
ccagagcaucccguggaacc

SEQ ID NO: 1546 - RNA, 20 nt, Artificial Sequence
  Synthetic polynucleotide
aggcugccuccgucuuucca

SEQ ID NO: 1547 - RNA, 20 nt, Artificial Sequence
  Synthetic polynucleotide
agaccagccggugacccugg

SEQ ID NO: 1548 - RNA, 20 nt, Artificial Sequence
  Synthetic polynucleotide
gauuaccccuccacgguacc

SEQ ID NO: 1549 - RNA, 20 nt, Artificial Sequence
  Synthetic polynucleotide
gguccagccuguggggccac

SEQ ID NO: 1550 - RNA, 20 nt, Artificial Sequence
  Synthetic polynucleotide
caggcgcuggcaggcggcgu

SEQ ID NO: 1551 - RNA, 20 nt, Artificial Sequence
  Synthetic polynucleotide
auugguggccccaacuguga

SEQ ID NO: 1552 - RNA, 20 nt, Artificial Sequence
  Synthetic polynucleotide
cccaugggugcuggggggca

SEQ ID NO: 1553 - RNA, 20 nt, Artificial Sequence
  Synthetic polynucleotide
guagaggcaggcaucguccc

SEQ ID NO: 1554 - RNA, 20 nt, Artificial Sequence
  Synthetic polynucleotide
gccggugacccuggggacuu

SEQ ID NO: 1555 - RNA, 20 nt, Artificial Sequence
  Synthetic polynucleotide
cagcuugcccccuugggccu

SEQ ID NO: 1556 - RNA, 20 nt, Artificial Sequence
  Synthetic polynucleotide
ccccgccgcuucccacuccu

SEQ ID NO: 1557 - RNA, 20 nt, Artificial Sequence
  Synthetic polynucleotide
cacugguugggcugaccucg

SEQ ID NO: 1558 - RNA, 20 nt, Artificial Sequence
  Synthetic polynucleotide
gggcauggcagcaggaagcg

SEQ ID NO: 1559 - RNA, 20 nt, Artificial Sequence
  Synthetic polynucleotide
cuuggcgcagcgguggaagg

SEQ ID NO: 1560 - RNA, 20 nt, Artificial Sequence
  Synthetic polynucleotide
gaccucuuugccccagggga

SEQ ID NO: 1561 - RNA, 20 nt, Artificial Sequence
  Synthetic polynucleotide
cuucuuccuggcuuccuggu

SEQ ID NO: 1562 - RNA, 20 nt, Artificial Sequence
  Synthetic polynucleotide
ccagccucagcucccgaggu

SEQ ID NO: 1563 - RNA, 20 nt, Artificial Sequence
  Synthetic polynucleotide
gagccggagcucacccuggc

SEQ ID NO: 1564 - RNA, 20 nt, Artificial Sequence
  Synthetic polynucleotide
gcccgcugcgccccagauga

SEQ ID NO: 1565 - RNA, 20 nt, Artificial Sequence
  Synthetic polynucleotide
uguggacgcugcaguuggcc

SEQ ID NO: 1566 - RNA, 20 nt, Artificial Sequence
  Synthetic polynucleotide
cgcacugguugggcugaccu

SEQ ID NO: 1567 - RNA, 20 nt, Artificial Sequence
  Synthetic polynucleotide
gucacacuugcuggccugcu

SEQ ID NO: 1568 - RNA, 21 nt, Artificial Sequence
  Synthetic polynucleotide
ccccuggcggguggguacagc

SEQ ID NO: 1569 - RNA, 20 nt, Artificial Sequence
  Synthetic polynucleotide
gacuacacacguguugucua

SEQ ID NO: 1570 - RNA, 20 nt, Artificial Sequence
  Synthetic polynucleotide
cugcuaccccaggccaacug

SEQ ID NO: 1571 - RNA, 20 nt, Artificial Sequence
  Synthetic polynucleotide
uguggacgcugcaguuggcc

SEQ ID NO: 1572 - RNA, 20 nt, Artificial Sequence
  Synthetic polynucleotide
ggcugucacggccccuucgc

SEQ ID NO: 1573 - RNA, 20 nt, Artificial Sequence
  Synthetic polynucleotide
ucccgcgggcgcccgugcgc

SEQ ID NO: 1574 - RNA, 20 nt, Artificial Sequence
  Synthetic polynucleotide
uggccccaacugugaugacc

SEQ ID NO: 1575 - RNA, 20 nt, Artificial Sequence
  Synthetic polynucleotide
ccugggaccucccacguccu

SEQ ID NO: 1576 - RNA, 20 nt, Artificial Sequence
  Synthetic polynucleotide
ccaagaccagccggugaccc

SEQ ID NO: 1577 - RNA, 20 nt, Artificial Sequence
  Synthetic polynucleotide
gcagaccagcuugcccccuu

SEQ ID NO: 1578 - RNA, 20 nt, Artificial Sequence
  Synthetic polynucleotide
ccagccuguggggccacugg

SEQ ID NO: 1579 - RNA, 20 nt, Artificial Sequence
  Synthetic polynucleotide
acuacacacguguugucuac

SEQ ID NO: 1580 - RNA, 20 nt, Artificial Sequence
  Synthetic polynucleotide
cucacccccaaaagcguugu

SEQ ID NO: 1581 - RNA, 20 nt, Artificial Sequence
  Synthetic polynucleotide
ggagggcacugcagccaguc

SEQ ID NO: 1582 - RNA, 20 nt, Artificial Sequence
  Synthetic polynucleotide
gauguccuccccuggggcaa

SEQ ID NO: 1583 - RNA, 20 nt, Artificial Sequence
  Synthetic polynucleotide
cuuaccugccccaugggugc

SEQ ID NO: 1584 - RNA, 20 nt, Artificial Sequence
  Synthetic polynucleotide
ggccccaacugugaugaccu

SEQ ID NO: 1585 - RNA, 20 nt, Artificial Sequence
  Synthetic polynucleotide
agccgccugugcugaggcca

SEQ ID NO: 1586 - RNA, 20 nt, Artificial Sequence
  Synthetic polynucleotide
cccugaggaccagcggguac

SEQ ID NO: 1587 - RNA, 20 nt, Artificial Sequence
  Synthetic polynucleotide
cccugggaccucccacgucc

SEQ ID NO: 1588 - RNA, 20 nt, Artificial Sequence
  Synthetic polynucleotide
cagagcaucccguggaaccu

SEQ ID NO: 1589 - RNA, 20 nt, Artificial Sequence
  Synthetic polynucleotide
gcugaccaccccugccaggu

SEQ ID NO: 1590 - RNA, 20 nt, Artificial Sequence
  Synthetic polynucleotide
uuaccugccccaugggugcu

SEQ ID NO: 1591 - RNA, 20 nt, Artificial Sequence
  Synthetic polynucleotide
gccccuucgcuggugcugcc

SEQ ID NO: 1592 - RNA, 20 nt, Artificial Sequence
  Synthetic polynucleotide
caggauccguggagguugcc

SEQ ID NO: 1593 - RNA, 20 nt, Artificial Sequence
  Synthetic polynucleotide
cagcucagcagcuccucauc

SEQ ID NO: 1594 - RNA, 20 nt, Artificial Sequence
  Synthetic polynucleotide
ggcagaccagcuugcccccu

SEQ ID NO: 1595 - RNA, 20 nt, Artificial Sequence
  Synthetic polynucleotide
agaaugugcccgaggaggac

SEQ ID NO: 1596 - RNA, 20 nt, Artificial Sequence
  Synthetic polynucleotide
cauggccuucuuccuggcuu

SEQ ID NO: 1597 - RNA, 20 nt, Artificial Sequence
  Synthetic polynucleotide
ccccaaaagcguugugggcc

SEQ ID NO: 1598 - RNA, 20 nt, Artificial Sequence
  Synthetic polynucleotide
ggcaucgucccggaaguugc

SEQ ID NO: 1599 - RNA, 20 nt, Artificial Sequence
  Synthetic polynucleotide
guccacacagcggccaaagu

SEQ ID NO: 1600 - RNA, 20 nt, Artificial Sequence
  Synthetic polynucleotide
cuucccacuccuggagaaac

SEQ ID NO: 1601 - RNA, 20 nt, Artificial Sequence
  Synthetic polynucleotide
ugccgagccggagcucaccc

SEQ ID NO: 1602 - RNA, 20 nt, Artificial Sequence
  Synthetic polynucleotide
guccacacagcuccaccagc

SEQ ID NO: 1603 - RNA, 20 nt, Artificial Sequence
  Synthetic polynucleotide
agcuugcccccuugggccuu

SEQ ID NO: 1604 - RNA, 20 nt, Artificial Sequence
  Synthetic polynucleotide
ugcaguuggccugggguagc

SEQ ID NO: 1605 - RNA, 20 nt, Artificial Sequence
  Synthetic polynucleotide
cacccacaagccgccugugc

SEQ ID NO: 1606 - RNA, 20 nt, Artificial Sequence
  Synthetic polynucleotide
gccggugacccuggggacuu

SEQ ID NO: 1607 - RNA, 20 nt, Artificial Sequence
  Synthetic polynucleotide
ggccugguucccugaggacc

SEQ ID NO: 1608 - RNA, 20 nt, Artificial Sequence
  Synthetic polynucleotide
ccccugccaggugggugcca

SEQ ID NO: 1609 - RNA, 20 nt, Artificial Sequence
  Synthetic polynucleotide
gguccagccuguggggccac

SEQ ID NO: 1610 - RNA, 20 nt, Artificial Sequence
  Synthetic polynucleotide
cgccccagaugaggagcugc

SEQ ID NO: 1611 - RNA, 20 nt, Artificial Sequence
  Synthetic polynucleotide
ugcugcugccccuggcgggu

SEQ ID NO: 1612 - RNA, 20 nt, Artificial Sequence
  Synthetic polynucleotide
uugacuuugcauuccagacc

SEQ ID NO: 1613 - RNA, 20 nt, Artificial Sequence
  Synthetic polynucleotide
gccccaggggaggacaucau

SEQ ID NO: 1614 - RNA, 20 nt, Artificial Sequence
  Synthetic polynucleotide
uguggacgcugcaguuggcc

SEQ ID NO: 1615 - RNA, 20 nt, Artificial Sequence
  Synthetic polynucleotide
uuaccugccccaugggugcu

SEQ ID NO: 1616 - RNA, 20 nt, Artificial Sequence
  Synthetic polynucleotide
cccugggaccucccacgucc

SEQ ID NO: 1617 - RNA, 20 nt, Artificial Sequence
  Synthetic polynucleotide
agccgccugugcugaggcca

SEQ ID NO: 1618 - RNA, 20 nt, Artificial Sequence
  Synthetic polynucleotide
aaucccggccccucaggagc

SEQ ID NO: 1619 - RNA, 20 nt, Artificial Sequence
  Synthetic polynucleotide
cacugcagccagucaggguc

SEQ ID NO: 1620 - RNA, 20 nt, Artificial Sequence
  Synthetic polynucleotide
uggccuucuuccuggcuucc

SEQ ID NO: 1621 - RNA, 20 nt, Artificial Sequence
  Synthetic polynucleotide
cgaggucagcccaaccagug

SEQ ID NO: 1622 - RNA, 20 nt, Artificial Sequence
  Synthetic polynucleotide
gccacgaggucagcccaacc

SEQ ID NO: 1623 - RNA, 20 nt, Artificial Sequence
  Synthetic polynucleotide
agcauacagagugaccaccg

SEQ ID NO: 1624 - RNA, 20 nt, Artificial Sequence
  Synthetic polynucleotide
cacgaggucagcccaaccag

SEQ ID NO: 1625 - RNA, 20 nt, Artificial Sequence
  Synthetic polynucleotide
cagcggguacugacccccaa

SEQ ID NO: 1626 - RNA, 20 nt, Artificial Sequence
  Synthetic polynucleotide
cagacagguaagcacggccg

SEQ ID NO: 1627 - RNA, 20 nt, Artificial Sequence
  Synthetic polynucleotide
gacagguaagcacggccguc

SEQ ID NO: 1628 - RNA, 20 nt, Artificial Sequence
  Synthetic polynucleotide
gccaccaaugcccaagacca

SEQ ID NO: 1629 - RNA, 20 nt, Artificial Sequence
  Synthetic polynucleotide
gaggccacgaggucagccca

SEQ ID NO: 1630 - RNA, 20 nt, Artificial Sequence
  Synthetic polynucleotide
caaugcccaagaccagccgg

SEQ ID NO: 1631 - RNA, 20 nt, Artificial Sequence
  Synthetic polynucleotide
gcagcuguuuugcaggacug

SEQ ID NO: 1632 - RNA, 20 nt, Artificial Sequence
  Synthetic polynucleotide
cucaacugccaagggaaggg

SEQ ID NO: 1633 - RNA, 20 nt, Artificial Sequence
  Synthetic polynucleotide
cacaggcugcugcccacgug

SEQ ID NO: 1634 - RNA, 20 nt, Artificial Sequence
  Synthetic polynucleotide
ggucagcccaaccagugcgu

SEQ ID NO: 1635 - RNA, 20 nt, Artificial Sequence
  Synthetic polynucleotide
aggcccaggcugcccgccgg

SEQ ID NO: 1636 - RNA, 20 nt, Artificial Sequence
  Synthetic polynucleotide
gcaggcccaggcugcccgcc

SEQ ID NO: 1637 - RNA, 20 nt, Artificial Sequence
  Synthetic polynucleotide
caaccagugcgugggccaca

SEQ ID NO: 1638 - RNA, 20 nt, Artificial Sequence
  Synthetic polynucleotide
ucuaaggcccaagggggcaa

SEQ ID NO: 1639 - RNA, 20 nt, Artificial Sequence
  Synthetic polynucleotide
ccagccuguggggccacugg

SEQ ID NO: 1640 - RNA, 20 nt, Artificial Sequence
  Synthetic polynucleotide
accaacagggccacguccuc

SEQ ID NO: 1641 - RNA, 20 nt, Artificial Sequence
  Synthetic polynucleotide
gugcgcaggaggacgaggac

SEQ ID NO: 1642 - RNA, 20 nt, Artificial Sequence
  Synthetic polynucleotide
gccaaccugcaaaaagggcc

SEQ ID NO: 1643 - RNA, 20 nt, Artificial Sequence
  Synthetic polynucleotide
aacgccgccugccagcgccu

SEQ ID NO: 1644 - RNA, 20 nt, Artificial Sequence
  Synthetic polynucleotide
gccaagggaagggcacgguu

SEQ ID NO: 1645 - RNA, 20 nt, Artificial Sequence
  Synthetic polynucleotide
cgccgccugccagcgccugg

SEQ ID NO: 1646 - RNA, 20 nt, Artificial Sequence
  Synthetic polynucleotide
aaaagccagcugguccagcc

SEQ ID NO: 1647 - RNA, 20 nt, Artificial Sequence
  Synthetic polynucleotide
ggagcaggugaagaggcccg

SEQ ID NO: 1648 - RNA, 20 nt, Artificial Sequence
  Synthetic polynucleotide
ugaauaccagccccccggua

SEQ ID NO: 1649 - RNA, 20 nt, Artificial Sequence
  Synthetic polynucleotide
augaauaccagccccccggu

SEQ ID NO: 1650 - RNA, 20 nt, Artificial Sequence
  Synthetic polynucleotide
ugcaggcccaggcugcccgc

SEQ ID NO: 1651 - RNA, 20 nt, Artificial Sequence
  Synthetic polynucleotide
aggucagcccaaccagugcg

SEQ ID NO: 1652 - RNA, 20 nt, Artificial Sequence
  Synthetic polynucleotide
agcaggugaagaggcccgug

SEQ ID NO: 1653 - RNA, 20 nt, Artificial Sequence
  Synthetic polynucleotide
ugcuaccccaggccaacugc

SEQ ID NO: 1654 - RNA, 20 nt, Artificial Sequence
  Synthetic polynucleotide
uccucagggaaccaggccuc

SEQ ID NO: 1655 - RNA, 20 nt, Artificial Sequence
  Synthetic polynucleotide
gcccgugcgcaggaggacga

SEQ ID NO: 1656 - RNA, 20 nt, Artificial Sequence
  Synthetic polynucleotide
aagccagcugguccagccug

SEQ ID NO: 1657 - RNA, 20 nt, Artificial Sequence
  Synthetic polynucleotide
ggcgcccgugcgcaggagga

SEQ ID NO: 1658 - RNA, 20 nt, Artificial Sequence
  Synthetic polynucleotide
ccaggaccgccuggagcuga

SEQ ID NO: 1659 - RNA, 20 nt, Artificial Sequence
  Synthetic polynucleotide
cgugcgcaggaggacgagga

SEQ ID NO: 1660 - RNA, 19 nt, Artificial Sequence
  Synthetic polynucleotide
gcaccuggcgcaggccucc

SEQ ID NO: 1661 - RNA, 20 nt, Artificial Sequence
  Synthetic polynucleotide
cuuugcccagagcaucccgu

SEQ ID NO: 1662 - RNA, 20 nt, Artificial Sequence
  Synthetic polynucleotide
ugucuuugcccagagcaucc

SEQ ID NO: 1663 - RNA, 20 nt, Artificial Sequence
  Synthetic polynucleotide
ggccacgaggucagcccaac

SEQ ID NO: 1664 - RNA, 20 nt, Artificial Sequence
  Synthetic polynucleotide
cugguccagccuguggggcc

SEQ ID NO: 1665 - RNA, 20 nt, Artificial Sequence
  Synthetic polynucleotide
agcggccaccaggaccgccu

SEQ ID NO: 1666 - RNA, 20 nt, Artificial Sequence
  Synthetic polynucleotide
aaccagugcgugggccacag

SEQ ID NO: 1667 - RNA, 20 nt, Artificial Sequence
  Synthetic polynucleotide
cagcggccaccaggaccgcc

SEQ ID NO: 1668 - RNA, 20 nt, Artificial Sequence
  Synthetic polynucleotide
guccagcccuccucgcaggc

SEQ ID NO: 1669 - RNA, 20 nt, Artificial Sequence
  Synthetic polynucleotide
ucuuugcccagagcaucccg

SEQ ID NO: 1670 - RNA, 20 nt, Artificial Sequence
  Synthetic polynucleotide
aucacaggcugcugcccacg

SEQ ID NO: 1671 - RNA, 20 nt, Artificial Sequence
  Synthetic polynucleotide
caccaaugcccaagaccagc

SEQ ID NO: 1672 - RNA, 20 nt, Artificial Sequence
  Synthetic polynucleotide
ugccagcgccuggcgagggc

SEQ ID NO: 1673 - RNA, 20 nt, Artificial Sequence
  Synthetic polynucleotide
guccagccuguggggccacu

SEQ ID NO: 1674 - RNA, 20 nt, Artificial Sequence
  Synthetic polynucleotide
caacagggccacguccucac

SEQ ID NO: 1675 - RNA, 20 nt, Artificial Sequence
  Synthetic polynucleotide
ccagagcaucccguggaacc

SEQ ID NO: 1676 - RNA, 20 nt, Artificial Sequence
  Synthetic polynucleotide
cgccugccagcgccuggcga

SEQ ID NO: 1677 - RNA, 20 nt, Artificial Sequence
  Synthetic polynucleotide
cgcccgugcgcaggaggacg

SEQ ID NO: 1678 - RNA, 20 nt, Artificial Sequence
  Synthetic polynucleotide
gguccagccuguggggccac

SEQ ID NO: 1679 - RNA, 20 nt, Artificial Sequence
  Synthetic polynucleotide
agcauacagagugaccaccg

SEQ ID NO: 1680 - RNA, 20 nt, Artificial Sequence
  Synthetic polynucleotide
cagagugaccaccgggaaau

SEQ ID NO: 1681 - RNA, 20 nt, Artificial Sequence
  Synthetic polynucleotide
ggcgcaggccucccaggagc

SEQ ID NO: 1682 - RNA, 20 nt, Artificial Sequence
  Synthetic polynucleotide
caccaggaccgccuggagcu

SEQ ID NO: 1683 - RNA, 20 nt, Artificial Sequence
  Synthetic polynucleotide
gccaaccugcaaaaagggcc

SEQ ID NO: 1684 - RNA, 20 nt, Artificial Sequence
  Synthetic polynucleotide
ccaagaccagccggugaccc

SEQ ID NO: 1685 - RNA, 20 nt, Artificial Sequence
  Synthetic polynucleotide
ugccagcgccuggcgagggc

SEQ ID NO: 1686 - RNA, 20 nt, Artificial Sequence
  Synthetic polynucleotide
caaccagugcgugggccaca

SEQ ID NO: 1687 - RNA, 20 nt, Artificial Sequence
  Synthetic polynucleotide
ccgccugccagcgccuggcg

SEQ ID NO: 1688 - RNA, 20 nt, Artificial Sequence
  Synthetic polynucleotide
ccagguuccacgggaugcuc

SEQ ID NO: 1689 - RNA, 20 nt, Artificial Sequence
  Synthetic polynucleotide
cccugaggaccagcggguac

SEQ ID NO: 1690 - RNA, 20 nt, Artificial Sequence
  Synthetic polynucleotide
agguuggcagcuguuuugca

SEQ ID NO: 1691 - RNA, 20 nt, Artificial Sequence
  Synthetic polynucleotide
uaaggcccaagggggcaagc

SEQ ID NO: 1692 - RNA, 20 nt, Artificial Sequence
  Synthetic polynucleotide
ccacgggaugcucugggcaa

SEQ ID NO: 1693 - RNA, 20 nt, Artificial Sequence
  Synthetic polynucleotide
caggguccagcccuccucgc

SEQ ID NO: 1694 - RNA, 20 nt, Artificial Sequence
  Synthetic polynucleotide
gcgcaggaggacgaggacgg

SEQ ID NO: 1695 - RNA, 20 nt, Artificial Sequence
  Synthetic polynucleotide
ccaaccagugcgugggccac

SEQ ID NO: 1696 - RNA, 20 nt, Artificial Sequence
  Synthetic polynucleotide
caggcccaggcugcccgccg

SEQ ID NO: 1697 - RNA, 20 nt, Artificial Sequence
  Synthetic polynucleotide
ugcaggcccaggcugcccgc

SEQ ID NO: 1698 - RNA, 20 nt, Artificial Sequence
  Synthetic polynucleotide
cagcggccaccaggaccgcc

SEQ ID NO: 1699 - RNA, 20 nt, Artificial Sequence
  Synthetic polynucleotide
ucaggguccagcccuccucg

SEQ ID NO: 1700 - RNA, 20 nt, Artificial Sequence
  Synthetic polynucleotide
ccaccaggaccgccuggagc

SEQ ID NO: 1701 - RNA, 20 nt, Artificial Sequence
  Synthetic polynucleotide
cgcaccuuggcgcagcggug

SEQ ID NO: 1702 - RNA, 20 nt, Artificial Sequence
  Synthetic polynucleotide
ggucaccugccagagcccga

SEQ ID NO: 1703 - RNA, 20 nt, Artificial Sequence
  Synthetic polynucleotide
gaugaccuggaaaggugagg

SEQ ID NO: 1704 - RNA, 20 nt, Artificial Sequence
  Synthetic polynucleotide
ccgcaccuuggcgcagcggu

SEQ ID NO: 1705 - RNA, 20 nt, Artificial Sequence
  Synthetic polynucleotide
caccuuggcgcagcggugga

SEQ ID NO: 1706 - RNA, 20 nt, Artificial Sequence
  Synthetic polynucleotide
acacccgcaccuuggcgcag

SEQ ID NO: 1707 - RNA, 20 nt, Artificial Sequence
  Synthetic polynucleotide
cuacacccgcaccuuggcgc

SEQ ID NO: 1708 - RNA, 20 nt, Artificial Sequence
  Synthetic polynucleotide
acacuugcuggccugcucga

SEQ ID NO: 1709 - RNA, 20 nt, Artificial Sequence
  Synthetic polynucleotide
cugcaaugccuggugcaggg

SEQ ID NO: 1710 - RNA, 20 nt, Artificial Sequence
  Synthetic polynucleotide
ugaccuggaaaggugaggag

SEQ ID NO: 1711 - RNA, 20 nt, Artificial Sequence
  Synthetic polynucleotide
cccgcaccuuggcgcagcgg

SEQ ID NO: 1712 - RNA, 20 nt, Artificial Sequence
  Synthetic polynucleotide
auccugcuuaccugccccau

SEQ ID NO: 1713 - RNA, 20 nt, Artificial Sequence
  Synthetic polynucleotide
gcaccuuggcgcagcggugg

SEQ ID NO: 1714 - RNA, 20 nt, Artificial Sequence
  Synthetic polynucleotide
caccuuggcgcagcggugga

SEQ ID NO: 1715 - RNA, 20 nt, Artificial Sequence
  Synthetic polynucleotide
accugugaggacguggcccu

SEQ ID NO: 1716 - RNA, 20 nt, Artificial Sequence
  Synthetic polynucleotide
gccaaccugcaaaaagggcc

SEQ ID NO: 1717 - RNA, 20 nt, Artificial Sequence
  Synthetic polynucleotide
acacccgcaccuuggcgcag

SEQ ID NO: 1718 - RNA, 20 nt, Artificial Sequence
  Synthetic polynucleotide
caaugccuggugcaggggug

SEQ ID NO: 1719 - RNA, 20 nt, Artificial Sequence
  Synthetic polynucleotide
caccugccagagcccgagga

SEQ ID NO: 1720 - RNA, 20 nt, Artificial Sequence
  Synthetic polynucleotide
cugugaggacguggcccugu

SEQ ID NO: 1721 - RNA, 20 nt, Artificial Sequence
  Synthetic polynucleotide
ucuuuccaaggcgacauuug

SEQ ID NO: 1722 - RNA, 20 nt, Artificial Sequence
  Synthetic polynucleotide
gauccuggccccaugcaagg

SEQ ID NO: 1723 - RNA, 20 nt, Artificial Sequence
  Synthetic polynucleotide
uggccugcucgacgaacaca

SEQ ID NO: 1724 - RNA, 20 nt, Artificial Sequence
  Synthetic polynucleotide
acggauccuggccccaugca

SEQ ID NO: 1725 - RNA, 20 nt, Artificial Sequence
  Synthetic polynucleotide
cuuaccagccacgugggcag

SEQ ID NO: 1726 - RNA, 20 nt, Artificial Sequence
  Synthetic polynucleotide
gugaugaccuggaaagguga

SEQ ID NO: 1727 - RNA, 20 nt, Artificial Sequence
  Synthetic polynucleotide
ugugaugaccuggaaaggug

SEQ ID NO: 1728 - RNA, 20 nt, Artificial Sequence
  Synthetic polynucleotide
uaccugccccaugggugcug

SEQ ID NO: 1729 - RNA, 20 nt, Artificial Sequence
  Synthetic polynucleotide
augccuggugcaggggugaa

SEQ ID NO: 1730 - RNA, 20 nt, Artificial Sequence
  Synthetic polynucleotide
uuaccugccccaugggugcu

SEQ ID NO: 1731 - RNA, 20 nt, Artificial Sequence
  Synthetic polynucleotide
accuuggcgcagcgguggaa

SEQ ID NO: 1732 - RNA, 20 nt, Artificial Sequence
  Synthetic polynucleotide
aggccugggaggaacaaagc

SEQ ID NO: 1733 - RNA, 20 nt, Artificial Sequence
  Synthetic polynucleotide
ugggggucuuaccggggggc

SEQ ID NO: 1734 - RNA, 20 nt, Artificial Sequence
  Synthetic polynucleotide
ccugccagagcccgaggaaa

SEQ ID NO: 1735 - RNA, 20 nt, Artificial Sequence
  Synthetic polynucleotide
aaccacagcuccuggggcag

SEQ ID NO: 1736 - RNA, 20 nt, Artificial Sequence
  Synthetic polynucleotide
cggauccuggccccaugcaa

SEQ ID NO: 1737 - RNA, 20 nt, Artificial Sequence
  Synthetic polynucleotide
ggccucuucaccugcuccug

SEQ ID NO: 1738 - RNA, 20 nt, Artificial Sequence
  Synthetic polynucleotide
agcaccuaccucgggagcug

SEQ ID NO: 1739 - RNA, 20 nt, Artificial Sequence
  Synthetic polynucleotide
cacccgcaccuuggcgcagc

SEQ ID NO: 1740 - RNA, 20 nt, Artificial Sequence
  Synthetic polynucleotide
acugugaugaccuggaaagg

SEQ ID NO: 1741 - RNA, 20 nt, Artificial Sequence
  Synthetic polynucleotide
gugcuuaccugucuguggaa

SEQ ID NO: 1742 - RNA, 20 nt, Artificial Sequence
  Synthetic polynucleotide
ugggccuuagagucaaagac

SEQ ID NO: 1743 - RNA, 20 nt, Artificial Sequence
  Synthetic polynucleotide
cgugcuuaccugucugugga

SEQ ID NO: 1744 - RNA, 20 nt, Artificial Sequence
  Synthetic polynucleotide
uaccucgggagcugaggcug

SEQ ID NO: 1745 - RNA, 20 nt, Artificial Sequence
  Synthetic polynucleotide
cggucaccugccagagcccg

SEQ ID NO: 1746 - RNA, 20 nt, Artificial Sequence
  Synthetic polynucleotide
uggugacuuaccagccacgu

SEQ ID NO: 1747 - RNA, 20 nt, Artificial Sequence
  Synthetic polynucleotide
gccaaccugcaaaaagggcc

SEQ ID NO: 1748 - RNA, 20 nt, Artificial Sequence
  Synthetic polynucleotide
ugacuuaccagccacguggg

SEQ ID NO: 1749 - RNA, 20 nt, Artificial Sequence
  Synthetic polynucleotide
ucaaggccugcagaagccag

SEQ ID NO: 1750 - RNA, 20 nt, Artificial Sequence
  Synthetic polynucleotide
cuuuccaaggcgacauuugu

SEQ ID NO: 1751 - RNA, 20 nt, Artificial Sequence
  Synthetic polynucleotide
gugaugaccuggaaagguga

SEQ ID NO: 1752 - RNA, 20 nt, Artificial Sequence
  Synthetic polynucleotide
cuuaccugccccaugggugc

SEQ ID NO: 1753 - RNA, 20 nt, Artificial Sequence
  Synthetic polynucleotide
ccgugcuuaccugucugugg

SEQ ID NO: 1754 - RNA, 20 nt, Artificial Sequence
  Synthetic polynucleotide
cugcagaagccagagaggcc

SEQ ID NO: 1755 - RNA, 20 nt, Artificial Sequence
  Synthetic polynucleotide
cagcaccuaccucgggagcu

SEQ ID NO: 1756 - RNA, 20 nt, Artificial Sequence
  Synthetic polynucleotide
gccuccuaccugugaggacg

SEQ ID NO: 1757 - RNA, 20 nt, Artificial Sequence
  Synthetic polynucleotide
cgucuuuccaaggcgacauu

SEQ ID NO: 1758 - RNA, 20 nt, Artificial Sequence
  Synthetic polynucleotide
acggauccuggccccaugca

SEQ ID NO: 1759 - RNA, 20 nt, Artificial Sequence
  Synthetic polynucleotide
uuaccugccccaugggugcu

SEQ ID NO: 1760 - RNA, 20 nt, Artificial Sequence
  Synthetic polynucleotide
caccugcuccugaggggccg

SEQ ID NO: 1761 - RNA, 20 nt, Artificial Sequence
  Synthetic polynucleotide
ccugcaaaaagggccuggga

SEQ ID NO: 1762 - RNA, 20 nt, Artificial Sequence
  Synthetic polynucleotide
uucaccugcuccugaggggc

SEQ ID NO: 1763 - RNA, 20 nt, Artificial Sequence
  Synthetic polynucleotide
accuggaaaggugaggaggu

SEQ ID NO: 1764 - RNA, 20 nt, Artificial Sequence
  Synthetic polynucleotide
ccccuugggccuuagaguca

SEQ ID NO: 1765 - RNA, 20 nt, Artificial Sequence
  Synthetic polynucleotide
ccugcagaagccagagaggc

SEQ ID NO: 1766 - RNA, 20 nt, Artificial Sequence
  Synthetic polynucleotide
cuucaaggccugcagaagcc

SEQ ID NO: 1767 - RNA, 20 nt, Artificial Sequence
  Synthetic polynucleotide
cuuaccugccccaugggugc

SEQ ID NO: 1768 - RNA, 20 nt, Artificial Sequence
  Synthetic polynucleotide
uuaccugccccaugggugcu

SEQ ID NO: 1769 - RNA, 20 nt, Artificial Sequence
  Synthetic polynucleotide
ugcauccuuggcggucuugg

SEQ ID NO: 1770 - RNA, 20 nt, Artificial Sequence
  Synthetic polynucleotide
auccuuggcggucuuggugg

SEQ ID NO: 1771 - RNA, 20 nt, Artificial Sequence
  Synthetic polynucleotide
gcauccuuggcggucuuggu

SEQ ID NO: 1772 - RNA, 20 nt, Artificial Sequence
  Synthetic polynucleotide
ugcauccuuggcggucuugg

SEQ ID NO: 1773 - RNA, 20 nt, Artificial Sequence
  Synthetic polynucleotide
ugcauccuuggcggucuugg

SEQ ID NO: 1774 - RNA, 20 nt, Artificial Sequence
  Synthetic polynucleotide
cucugcccguaagcacuugg

SEQ ID NO: 1775 - RNA, 20 nt, Artificial Sequence
  Synthetic polynucleotide
ggccucugcccguaagcacu

SEQ ID NO: 1776 - RNA, 20 nt, Artificial Sequence
  Synthetic polynucleotide
cuggccucugcccguaagca

SEQ ID NO: 1777 - RNA, 20 nt, Artificial Sequence
  Synthetic polynucleotide
ucugcccguaagcacuuggu

SEQ ID NO: 1778 - RNA, 20 nt, Artificial Sequence
  Synthetic polynucleotide
cugcccguaagcacuuggug

SEQ ID NO: 1779 - RNA, 20 nt, Artificial Sequence
  Synthetic polynucleotide
gccucugcccguaagcacuu

SEQ ID NO: 1780 - RNA, 20 nt, Artificial Sequence
  Synthetic polynucleotide
ggccucugcccguaagcacu

SEQ ID NO: 1781 - RNA, 20 nt, Artificial Sequence
  Synthetic polynucleotide
ugcuuacgggcagaggccag

SEQ ID NO: 1782 - RNA, 20 nt, Artificial Sequence
  Synthetic polynucleotide
agugcuuacgggcagaggcc

SEQ ID NO: 1783 - RNA, 20 nt, Artificial Sequence
  Synthetic polynucleotide
gugcuuacgggcagaggcca

SEQ ID NO: 1784 - RNA, 20 nt, Artificial Sequence
  Synthetic polynucleotide
aagugcuuacgggcagaggc

SEQ ID NO: 1785 - RNA, 20 nt, Artificial Sequence
  Synthetic polynucleotide
agugcuuacgggcagaggcc

SEQ ID NO: 1786 - RNA, 20 nt, Artificial Sequence
  Synthetic polynucleotide
cgggcagaggccaggagcgc

SEQ ID NO: 1787 - RNA, 20 nt, Artificial Sequence
  Synthetic polynucleotide
gcuuacgggcagaggccagg

SEQ ID NO: 1788 - RNA, 20 nt, Artificial Sequence
  Synthetic polynucleotide
ggcucuaccgagcgauaaca

SEQ ID NO: 1789 - RNA, 20 nt, Artificial Sequence
  Synthetic polynucleotide
cgggcucuaccgagcgauaa

SEQ ID NO: 1790 - RNA, 20 nt, Artificial Sequence
  Synthetic polynucleotide
gggcucuaccgagcgauaac

SEQ ID NO: 1791 - RNA, 20 nt, Artificial Sequence
  Synthetic polynucleotide
gcucuaccgagcgauaacag

SEQ ID NO: 1792 - RNA, 20 nt, Artificial Sequence
  Synthetic polynucleotide
uuaaaaagccgaugucacau

SEQ ID NO: 1793 - RNA, 20 nt, Artificial Sequence
  Synthetic polynucleotide
ccgaugucacaucggccguu

SEQ ID NO: 1794 - RNA, 20 nt, Artificial Sequence
  Synthetic polynucleotide
auaaacguugcagcagcucc

SEQ ID NO: 1795 - RNA, 20 nt, Artificial Sequence
  Synthetic polynucleotide
uaaacguugcagcagcuccu

SEQ ID NO: 1796 - RNA, 20 nt, Artificial Sequence
  Synthetic polynucleotide
uauaaacguugcagcagcuc

SEQ ID NO: 1797 - RNA, 20 nt, Artificial Sequence
  Synthetic polynucleotide
guuguuguccaagcauucgu

SEQ ID NO: 1798 - RNA, 20 nt, Artificial Sequence
  Synthetic polynucleotide
uccaagcauucguugguccc

SEQ ID NO: 1799 - RNA, 20 nt, Artificial Sequence
  Synthetic polynucleotide
ccguuguuguccaagcauuc

SEQ ID NO: 1800 - protein, 99 aa, Homo sapiens
MQPRVLLVVALLALLASARASEAEDASLLSFMQGYMKHATKTAKDALSSVQESQVAQQARGWVTDGFSSLKDYWSTVKDKFSEFWDLDPEVRPTSAVAA

SEQ ID NO: 1801 - DNA, 360 bp, Artificial Sequence
  Synthetic polynucleotide
gctcagttcatccctagaggcagctgctccaggaacagaggtgccatgcagccccgggtactccttgttgttgccctcctggcgctcctggcctctgcccgagcttcagaggccgaggatgcctcccttctcagcttcatgcagggttacatgaagcacgccaccaagaccgccaaggatgcactgagcagcgtgcaggagtcccaggtggcccagcaggccaggggctgggtgaccgatggcttcagttccctgaaagactactggagcaccgttaaggacaagttctctgagttctgggatttggaccctgaggtcagaccaacttcagccgtggctgcctgagacctcaatacccca

SEQ ID NO: 1802 - protein, 99 aa, Artificial Sequence; identical to SEQ ID NO: 1800
  Synthetic polypeptide

SEQ ID NO: 1803 - DNA, 5164 bp, Artificial Sequence
  Synthetic polynucleotide
gtgggcccaggggacatctcagccccgagaagggtcagcggcccctcctggaccaccgactccccgcagaactcctctgtgccctctcctcaccagaccttgttcctcccagttgctcccacagccagggggcagtgagggctgctcttcccccagccccactgaggaacccaggaaggtgaacgagagaatcagtcctggtgggggctggggagggccccagacatgagaccagctcctcccccaggggatgttatcagtgggtccagagggcaaaatagggagcctggtggagggaggggcaaaggcctcgggctctgagcggccttggcccttctccaccaacccctgccctacactaagggggaggcagcggggggcacacagggtgggggcgggtggggggctgctgggtgagcagcactcgcctgcctggattgaaacccagagatggaggtgctgggaggggctgtgagagctcagccctgtaaccaggccttgccggagccactgatgcctggtcttctgtgcctttactccaaacaccccccagcccaagccacccacttgttctcaagtctgaagaagcccctcacccctctactccaggctgtgttcagggcttggggctggtggagggaggggcctgaaattccagtgtgaaaggctgagatgggcccgaggcccctggcctatgtccaagccatttcccctctcaccagcctctccctggggagccagtcagctaggaaggaatgagggctccccaggcccacccccagttcctgagctcatctgggctgcagggctggcgggacagcagcgtggactcagtctcctagggatttcccaactctcccgcccgcttgctgcatctggacaccctgcctcaggccctcatctccactggtcagcaggtgacctttgcccagcgccctgggtcctcagtgcctgctgccctggagatgatataaaacaggtcagaaccctcctgcctgtctgctcagttcatccctagaggcagctgctccaggtaatgccctctggggaggggaaagaggaggggaggaggatgaagaggggcaagaggagctccctgcccagcccagccagcaagcctggagaagcacttgctagagctaaggaagcctcggagctggacgggtgccccccacccctcatcataacctgaagaacatggaggcccgggaggggtgtcacttgcccaaagctacacagggggtggggctggaagtggctccaagtgcaggttcccccctcattcttcaggcttagggctggaggaagccttagacagcccagtcctaccccagacagggaaactgaggcctggagagggccagaaatcacccaaagacacacagcatgttggctggactggacggagatcagtccagaccgcaggtgccttgatgttcagtctggtgggttttctgctccatcccacccacctccctttgggcctcgatccctcgcccctcaccagtcccccttctgagagcccgtattagcagggagccggcccctactccttctggcagacccagctaaggttctaccttaggggccacgccacctccccagggaggggtccagaggcatggggacctggggtgcccctcacaggacacttccttgcaggaacagaggtgccatgcagccccgggtactccttgttgttgccctcctggcgctcctggcctctgcccgtaagcacttggtgggactgggctgggggcagggtggaggcaacttggggatcccagtcccaatgggtggtcaagcaggagcccagggctcgtccagaggccgatccaccccactcagccctgctctttcctcaggagcttcagaggccgaggatgcctcccttctcagcttcatgcagggttacatgaagcacgccaccaagaccgccaaggatgcactgagcagcgtgcaggagtcccaggtggcccagcaggccaggtacacccgctggcctccctccccatcccccctgccagctgcctccattcccacccgcccctgccctggtgagatcccaacaatggaatggaggtgctccagcctcccctgggcctgtgcctcttcagcctcctctttcctcacagggcctttgtcaggctgctgcgggagagatgacagagttgagactgcattcctcccaggtccctcctttctccccggagcagtcctagggcgtgccgttttagccctcatttccattttcctttcctttccctttctttctctttctatttctttctttctttctttctttctttctttctttctttctttctttctttctttctttctttctttcctttctttctttcctttctttctttcctttctttctttctttcctttctttctctttctttctttctttcctttttctttctttccctctcttcctttctctctttctttcttcttcttttttttttaatggagtctccctctgtcacctaggctggagtgcagtggtgccatctcggctcactgcaacctccgtctcccgggttcaacccattctcctgcctcagcctcccaagtagctgggattacaggcacgcgccaccacacccagctaatttttgtatttttagcagagatggggtttcaccatgttggccaggttggtcttgaattcctgacctcaggggatcctcctgcctcggcctcccaaagtgctgggattacaggcatgagccactgcgcctggccccattttccttttctgaaggtctggctagagcagtggtcctcagcctttttggcaccagggaccagttttgtggtggacaatttttccatgggccagcggggatggttttgggatgaagctgttccacctcagatcatcaggcattagattctcataaggagccctccacctagatccctggcatgtgcagttcacaatagggttcacactcctatgagaatgtaaggccacttgatctgacaggaggcggagctcaggcggtattgctcactcacccaccactcacttcgtgctgtgcagcccggctcctaacagtccatggaccagtacctatctatgacttgggggttggggacccctgggctaggggtttgccttgggaggccccacctgacccaattcaagcccgtgagtgcttctgctttgttctaagacctggggccagtgtgagcagaagtgtgtccttcctctcccatcctgcccctgcccatcagtactctcctctcccctactcccttctccacctcaccctgactggcattagctggcatagcagaggtgttcataaacattcttagtccccagaaccggctttggggtaggtgttattttctcactttgcagatgagaaaattgaggctcagagcgattaggtgacctgccccagatcacacaactaatcaatcctccaatgactttccaaatgagaggctgcctccctctgtcctaccctgctcagagccaccaggttgtgcaactccaggcggtgctgtttgcacagaaaacaatgacagccttgacctttcacatctccccaccctgtcactttgtgcctcaggcccaggggcataaacatctgaggtgacctggagatggcagggtttgacttgtgctggggttcctgcaaggatatctcttctcccagggtggcagctgtgggggattcctgcctgaggtctcagggctgtcgtccagtgaagttgagagggtggtgtggtcctgactggtgtcgtccagtggggacatgggtgtgggtcccatggttgcctacagaggagttctcatgccctgctctgttgcttcccctgactgatttaggggctgggtgaccgatggcttcagttccctgaaagactactggagcaccgttaaggacaagttctctgagttctgggatttggaccctgaggtcagaccaacttcagccgtggctgcctgagacctcaataccccaagtccacctgcctatccatcctgcgagctccttgggtcctgcaatctccagggctgcccctgtaggttgcttaaaagggacagtattctcagtgctctcctaccccacctcatgcctggcccccctccaggcatgctggcctcccaataaagctggacaagaagctgctatgagtgggccgtcgcaagtgtgccatctgtgtctgggcatgggaaagggccgaggctgttctgtgggtgggcactggacagactccaggtcaggcaggcatggaggccagcgctctatccaccttctggtagctgggcagtctctgggcctcagtttcttcatctctaaggtaggaatcaccctccgtaccctgccttccttgacagctttgtgcggaaggtcaaacaggacaataagtttgctgatactttgataaactgttaggtgctgcacaacatgacttgagtgtgtgccccatgccagccactatgcctggcacttaagttgtcatcagagttgagactgtgtgtgtttactcaaaactgtggagctgacctcccctatccaggccccctagccctcttaggcgcacgtgaagggaggaggccggatgggctagaggttggagtaagatgcaacgaggcactattcttggctccaccacttgatatcagcctcagtttcttacatgtaaagtggatacaaccgtaccccctccaccgtaggtttgccgtgagattgaaatgagagagcgttcgaaccgtttggcacagcacctgcacgtaaagatgcttgatcaatgttgtcatgattacagttgagctgactgggcccttgggacccggactggagtggtggggggcagtgtcctgggaccaaaaagaagcacaaggtctcccaatagaggctgcttcctttgtgtccccaccacccgaaagatgtcaggtcagagagcccgagagctgcagatggcttgagtagggctccactcttcagatcaaaaaactgtggcccggagaggcgaaggcacttggccagcatcacagagccagcacgtggcagggccagaccttgagcccaggtcagctgcgtgtattctgctcagttggtgcagaaaacagttttgtcactcctatgtcaggtgttagggactcctttacagatctcagtggcatcagtac

SEQ ID NO: 1804 - protein, 445 aa, Artificial Sequence
  Synthetic polypeptide
MLCYVTRPDAVLMEVEVEAKANGEDCLNQVCRRLGIIEVDYFGLQFTGSKGESLWLNLRNRISQQMDGLAPYRLKLRVKFFVEPHLILQEQTRHIFFLHIKEALLAGHLLCSPEQAVELSALLAQTKFGDYNQNTAKYNYEELCAKELSSATLNSIVAKHKELEGTSQASAEYQVLQIVSAMENYGIEWHSVRDSEGQKLLIGVGPEGISICKDDFSPINRIAYPVVQMATQSGKNVYLTVTKESGNSIVLLFKMISTRAASGLYRAITETHAFYRCDTVTSAVMMQYSRDLKGHLASLFLNENINLGKKYVFDIKRTSKEVYDHARRALYNAGVVDLVSRNNQSPSHSPLKSSESSMNCSSCEGLSCQQTRVLQEKLRKLKEAMLCMVCCEEEINSTFCPCGHTVCCESCAAQLQSCPVCRSRVEHVQHVYLPTHTSLLNLTVI

SEQ ID NO: 1805 - protein, 839 aa, Artificial Sequence
  Synthetic polypeptide
AVGDRCERNEFQCQDGKCISYKWVCDGSAECQDGSDESQETCLSVTCKSGDFSCGGRVNRCIPQFWRCDGQVDCDNGSDEQGCPPKTCSQDEFRCHDGKCISRQFVCDSDRDCLDGSDEASCPVLTCGPASFQCNSSTCIPQLWACDNDPDCEDGSDEWPQRCRGLYVFQGDSSPCSAFEFHCLSGECIHSSWRCDGGPDCKDKSDEENCAVATCRPDEFQCSDGNCIHGSRQCDREYDCKDMSDEVGCVNVTLCEGPNKFKCHSGECITLDKVCNMARDCRDWSDEPIKECGTNECLDNNGGCSHVCNDLKIGYECLCPDGFQLVAQRRCEDIDECQDPDTCSQLCVNLEGGYKCQCEEGFQLDPHTKACKAVGSIAYLFFTNRHEVRKMTLDRSEYTSLIPNLRNVVALDTEVASNRIYWSDLSQRMICSTQLDRAHGVSSYDTVISRDIQAPDGLAVDWIHSNIYWTDSVLGTVSVADTKGVKRKTLFRENGSKPRAIVVDPVHGFMYWTDWGTPAKIKKGGLNGVDIYSLVTENIQWPNGITLDLLSGRLYWVDSKLHSISSIDVNGGNRKTILEDEKRLAHPFSLAVFEDKVFWTDIINEAIFSANRLTGSDVNLLAENLLSPEDMVLFHNLTQPRGVNWCERTTLSNGGCQYLCLPAPQINPHSPKFTCACPDGMLLARDMRSCLTEAEAAVATQETSTVRLKVSSTAVRTQHTTTRPVPDTSRLPGATPGLTTVEIVTMSHQALGDVAGRGNEKKPSSVRALSIVLPIVLLVFLCLGVFLLWKNWRLKNINSINFDNPVYQKTTEDEVHICHNQDGYSYPSRQMVSLEDDVA

SEQ ID NO: 1806 - RNA, 20 nt, Artificial Sequence
  Synthetic polynucleotide
ugcauccuuggcggucuugg

SEQ ID NO: 1807 - RNA, 20 nt, Artificial Sequence
  Synthetic polynucleotide
auccuuggcggucuuggugg

SEQ ID NO: 1808 - RNA, 20 nt, Artificial Sequence
  Synthetic polynucleotide
gcauccuuggcggucuuggu

SEQ ID NO: 1809 - RNA, 20 nt, Artificial Sequence
  Synthetic polynucleotide
ugcauccuuggcggucuugg

SEQ ID NO: 1810 - RNA, 20 nt, Artificial Sequence
  Synthetic polynucleotide
cucugcccguaagcacuugg

SEQ ID NO: 1811 - RNA, 20 nt, Artificial Sequence
  Synthetic polynucleotide
ggccucugcccguaagcacu

SEQ ID NO: 1812 - RNA, 20 nt, Artificial Sequence
  Synthetic polynucleotide
cuggccucugcccguaagca

SEQ ID NO: 1813 - RNA, 20 nt, Artificial Sequence
  Synthetic polynucleotide
ucugcccguaagcacuuggu

SEQ ID NO: 1814 - RNA, 20 nt, Artificial Sequence
  Synthetic polynucleotide
cugcccguaagcacuuggug

SEQ ID NO: 1815 - RNA, 20 nt, Artificial Sequence
  Synthetic polynucleotide
gccucugcccguaagcacuu

SEQ ID NO: 1816 - RNA, 20 nt, Artificial Sequence
  Synthetic polynucleotide
ggccucugcccguaagcacu

SEQ ID NO: 1817 - RNA, 20 nt, Artificial Sequence
  Synthetic polynucleotide
cagccccuaaaucagucagg

SEQ ID NO: 1818 - RNA, 20 nt, Artificial Sequence
  Synthetic polynucleotide
ccagccccuaaaucagucag

SEQ ID NO: 1819 - RNA, 20 nt, Artificial Sequence
  Synthetic polynucleotide
cccagccccuaaaucaguca

SEQ ID NO: 1820 - RNA, 20 nt, Artificial Sequence
  Synthetic polynucleotide
acccagccccuaaaucaguc

SEQ ID NO: 1821 - RNA, 20 nt, Artificial Sequence
  Synthetic polynucleotide
cacccagccccuaaaucagu

SEQ ID NO: 1822 - RNA, 20 nt, Artificial Sequence
  Synthetic polynucleotide
cggucacccagccccuaaau

SEQ ID NO: 1823 - RNA, 20 nt, Artificial Sequence
  Synthetic polynucleotide
aucggucacccagccccuaa

SEQ ID NO: 1824 - RNA, 20 nt, Artificial Sequence
  Synthetic polynucleotide
acccagccccuaaaucaguc

SEQ ID NO: 1825 - RNA, 20 nt, Artificial Sequence
  Synthetic polynucleotide
aguagucuuucagggaacug

SEQ ID NO: 1826 - RNA, 20 nt, Artificial Sequence
  Synthetic polynucleotide
ccaguagucuuucagggaac

SEQ ID NO: 1827 - RNA, 20 nt, Artificial Sequence
  Synthetic polynucleotide
gugcuccaguagucuuucag

SEQ ID NO: 1828 - RNA, 20 nt, Artificial Sequence
  Synthetic polynucleotide
ggugcuccaguagucuuuca

SEQ ID NO: 1829 - RNA, 20 nt, Artificial Sequence
  Synthetic polynucleotide
cggugcuccaguagucuuuc

SEQ ID NO: 1830 - RNA, 20 nt, Artificial Sequence
  Synthetic polynucleotide
acggugcuccaguagucuuu

SEQ ID NO: 1831 - RNA, 20 nt, Artificial Sequence
  Synthetic polynucleotide
guccaaaucccagaacucag

SEQ ID NO: 1832 - RNA, 20 nt, Artificial Sequence
  Synthetic polynucleotide
ggguccaaaucccagaacuc

SEQ ID NO: 1833 - RNA, 20 nt, Artificial Sequence
  Synthetic polynucleotide
cagaggugccaugcagcccc

SEQ ID NO: 1834 - RNA, 20 nt, Artificial Sequence
  Synthetic polynucleotide
cagcuucaugcaggguuaca

SEQ ID NO: 1835 - RNA, 20 nt, Artificial Sequence
  Synthetic polynucleotide
gcuucaugcaggguuacaug

SEQ ID NO: 1836 - RNA, 20 nt, Artificial Sequence
  Synthetic polynucleotide
ugagcagcgugcaggagucc

SEQ ID NO: 1837 - RNA, 20 nt, Artificial Sequence
  Synthetic polynucleotide
gagcagcgugcaggaguccc

SEQ ID NO: 1838 - RNA, 20 nt, Artificial Sequence
  Synthetic polynucleotide
agcagcgugcaggaguccca

SEQ ID NO: 1839 - RNA, 20 nt, Artificial Sequence
  Synthetic polynucleotide
cagcgugcaggagucccagg

SEQ ID NO: 1840 - RNA, 20 nt, Artificial Sequence
  Synthetic polynucleotide
ugcaggagucccagguggcc

SEQ ID NO: 1841 - RNA, 20 nt, Artificial Sequence
  Synthetic polynucleotide
cugagcagcgugcaggaguc

SEQ ID NO: 1842 - RNA, 20 nt, Artificial Sequence
  Synthetic polynucleotide
gagcagcgugcaggaguccc

SEQ ID NO: 1843 - RNA, 20 nt, Artificial Sequence
  Synthetic polynucleotide
aggagucccagguggcccag

SEQ ID NO: 1844 - RNA, 20 nt, Artificial Sequence
  Synthetic polynucleotide
ggagucccagguggcccagc

SEQ ID NO: 1845 - RNA, 20 nt, Artificial Sequence
  Synthetic polynucleotide
ucccagguggcccagcaggc

SEQ ID NO: 1846 - RNA, 20 nt, Artificial Sequence
  Synthetic polynucleotide
cccagguggcccagcaggcc

SEQ ID NO: 1847 - RNA, 20 nt, Artificial Sequence
  Synthetic polynucleotide
gucccagguggcccagcagg

SEQ ID NO: 1848 - RNA, 20 nt, Artificial Sequence
  Synthetic polynucleotide
agcaggccagguacacccgc

SEQ ID NO: 1849 - RNA, 20 nt, Artificial Sequence
  Synthetic polynucleotide
ugggauuuggacccugaggu

SEQ ID NO: 1850 - RNA, 20 nt, Artificial Sequence
  Synthetic polynucleotide
gggauuuggacccugagguc

SEQ ID NO: 1851 - RNA, 20 nt, Artificial Sequence
  Synthetic polynucleotide
cccugaggucagaccaacuu

SEQ ID NO: 1852 - RNA, 20 nt, Artificial Sequence
  Synthetic polynucleotide
gaggucagaccaacuucagc

SEQ ID NO: 1853 - RNA, 20 nt, Artificial Sequence
  Synthetic polynucleotide
ggucagaccaacuucagccg

SEQ ID NO: 1854 - RNA, 20 nt, Artificial Sequence
  Synthetic polynucleotide
auggcaccucuguuccugca

SEQ ID NO: 1855 - RNA, 20 nt, Artificial Sequence
  Synthetic polynucleotide
cauggcaccucuguuccugc

SEQ ID NO: 1856 - RNA, 20 nt, Artificial Sequence
  Synthetic polynucleotide
ccuggagcagcugccucuag

SEQ ID NO: 1857 - RNA, 20 nt, Artificial Sequence
  Synthetic polynucleotide
accuggagcagcugccucua

SEQ ID NO: 1858 - RNA, 20 nt, Artificial Sequence
  Synthetic polynucleotide
uaccuggagcagcugccucu

SEQ ID NO: 1859 - RNA, 20 nt, Artificial Sequence
  Synthetic polynucleotide
uuaccuggagcagcugccuc

SEQ ID NO: 1860 - RNA, 20 nt, Artificial Sequence
  Synthetic polynucleotide
uaccuggagcagcugccucu

SEQ ID NO: 1861 - RNA, 20 nt, Artificial Sequence
  Synthetic polynucleotide
cugcaaggaaguguccugug

SEQ ID NO: 1862 - RNA, 20 nt, Artificial Sequence
  Synthetic polynucleotide
ccugcaaggaaguguccugu

SEQ ID NO: 1863 - RNA, 20 nt, Artificial Sequence
  Synthetic polynucleotide
guuccugcaaggaagugucc

SEQ ID NO: 1864 - RNA, 20 nt, Artificial Sequence
  Synthetic polynucleotide
cugcaaggaaguguccugug

SEQ ID NO: 1865 - RNA, 20 nt, Artificial Sequence
  Synthetic polynucleotide
gacacuuccuugcaggaaca

SEQ ID NO: 1866 - RNA, 20 nt, Artificial Sequence
  Synthetic polynucleotide
acacuuccuugcaggaacag

SEQ ID NO: 1867 - RNA, 20 nt, Artificial Sequence
  Synthetic polynucleotide
cacuuccuugcaggaacaga

SEQ ID NO: 1868 - RNA, 20 nt, Artificial Sequence
  Synthetic polynucleotide
gcaggaacagaggugccaug

SEQ ID NO: 1869 - RNA, 20 nt, Artificial Sequence
  Synthetic polynucleotide
acacuuccuugcaggaacag

SEQ ID NO: 1870 - RNA, 20 nt, Artificial Sequence
  Synthetic polynucleotide
gggcagaggccaggagcgcc

SEQ ID NO: 1871 - RNA, 20 nt, Artificial Sequence
  Synthetic polynucleotide
cgggcagaggccaggagcgc

SEQ ID NO: 1872 - RNA, 20 nt, Artificial Sequence
  Synthetic polynucleotide
gcuuacgggcagaggccagg

SEQ ID NO: 1873 - RNA, 20 nt, Artificial Sequence
  Synthetic polynucleotide
ugcuuacgggcagaggccag

SEQ ID NO: 1874 - RNA, 20 nt, Artificial Sequence
  Synthetic polynucleotide
gugcuuacgggcagaggcca

SEQ ID NO: 1875 - RNA, 20 nt, Artificial Sequence
  Synthetic polynucleotide
agugcuuacgggcagaggcc

SEQ ID NO: 1876 - RNA, 20 nt, Artificial Sequence
  Synthetic polynucleotide
aagugcuuacgggcagaggc

SEQ ID NO: 1877 - RNA, 20 nt, Artificial Sequence
  Synthetic polynucleotide
gggcagaggccaggagcgcc

SEQ ID NO: 1878 - RNA, 20 nt, Artificial Sequence
  Synthetic polynucleotide
agugcuuacgggcagaggcc

SEQ ID NO: 1879 - RNA, 20 nt, Artificial Sequence
  Synthetic polynucleotide
cugaggaaagagcagggcug

SEQ ID NO: 1880 - RNA, 20 nt, Artificial Sequence
  Synthetic polynucleotide
ccugaggaaagagcagggcu

SEQ ID NO: 1881 - RNA, 20 nt, Artificial Sequence
  Synthetic polynucleotide
aagcuccugaggaaagagca

SEQ ID NO: 1882 - RNA, 20 nt, Artificial Sequence
  Synthetic polynucleotide
gaagcuccugaggaaagagc

SEQ ID NO: 1883 - RNA, 20 nt, Artificial Sequence
  Synthetic polynucleotide
ugaagcuccugaggaaagag

SEQ ID NO: 1884 - RNA, 20 nt, Artificial Sequence
  Synthetic polynucleotide
cucugaagcuccugaggaaa

SEQ ID NO: 1885 - RNA, 20 nt, Artificial Sequence
  Synthetic polynucleotide
cuccugaggaaagagcaggg

SEQ ID NO: 1886 - RNA, 20 nt, Artificial Sequence
  Synthetic polynucleotide
ugcucuuuccucaggagcuu

SEQ ID NO: 1887 - RNA, 20 nt, Artificial Sequence
  Synthetic polynucleotide
gcucuuuccucaggagcuuc

SEQ ID NO: 1888 - RNA, 20 nt, Artificial Sequence
  Synthetic polynucleotide
cucuuuccucaggagcuuca

SEQ ID NO: 1889 - RNA, 20 nt, Artificial Sequence
  Synthetic polynucleotide
ucuuuccucaggagcuucag

SEQ ID NO: 1890 - RNA, 20 nt, Artificial Sequence
  Synthetic polynucleotide
uccucaggagcuucagaggc

SEQ ID NO: 1891 - RNA, 20 nt, Artificial Sequence
  Synthetic polynucleotide
ccucaggagcuucagaggcc

SEQ ID NO: 1892 - RNA, 20 nt, Artificial Sequence
  Synthetic polynucleotide
cucaggagcuucagaggccg

SEQ ID NO: 1893 - RNA, 20 nt, Artificial Sequence
  Synthetic polynucleotide
ucaggagcuucagaggccga

SEQ ID NO: 1894 - RNA, 20 nt, Artificial Sequence
  Synthetic polynucleotide
ccucaggagcuucagaggcc

SEQ ID NO: 1895 - RNA, 20 nt, Artificial Sequence
  Synthetic polynucleotide
cuggccugcugggccaccug

SEQ ID NO: 1896 - RNA, 20 nt, Artificial Sequence
  Synthetic polynucleotide
ccuggccugcugggccaccu

SEQ ID NO: 1897 - RNA, 20 nt, Artificial Sequence
  Synthetic polynucleotide
accuggccugcugggccacc

SEQ ID NO: 1898 - RNA, 20 nt, Artificial Sequence
  Synthetic polynucleotide
gcggguguaccuggccugcu

SEQ ID NO: 1899 - RNA, 20 nt, Artificial Sequence
  Synthetic polynucleotide
agcggguguaccuggccugc

SEQ ID NO: 1900 - RNA, 20 nt, Artificial Sequence
  Synthetic polynucleotide
gccccuaaaucagucagggg

SEQ ID NO: 1901 - RNA, 20 nt, Artificial Sequence
  Synthetic polynucleotide
cagccccuaaaucagucagg

SEQ ID NO: 1902 - RNA, 20 nt, Artificial Sequence
  Synthetic polynucleotide
ccagccccuaaaucagucag

SEQ ID NO: 1903 - RNA, 20 nt, Artificial Sequence
  Synthetic polynucleotide
cccagccccuaaaucaguca

SEQ ID NO: 1904 - RNA, 20 nt, Artificial Sequence
  Synthetic polynucleotide
acccagccccuaaaucaguc

SEQ ID NO: 1905 - RNA, 20 nt, Artificial Sequence
  Synthetic polynucleotide
cacccagccccuaaaucagu

SEQ ID NO: 1906 - RNA, 20 nt, Artificial Sequence
  Synthetic polynucleotide
acccagccccuaaaucaguc

SEQ ID NO: 1907 - DNA, 40 bp, Artificial Sequence
  Synthetic polynucleotide
gctcagttcatccctagaggcagctgctccaggtaatgcc

SEQ ID NO: 1908 - DNA, 36 bp, Artificial Sequence
  Synthetic polynucleotide
caggacacttccttgcaggaacagaggtgccatgca

SEQ ID NO: 1909 - DNA, 39 bp, Artificial Sequence
  Synthetic polynucleotide
ggcgctcctggcctctgcccgtaagcacttggtgggact

SEQ ID NO: 1910 - DNA, 45 bp, Artificial Sequence
  Synthetic polynucleotide
cagccctgctctttcctcaggagcttcagaggccgaggatgcctc

SEQ ID NO: 1911 - DNA, 42 bp, Artificial Sequence
  Synthetic polynucleotide
caggtggcccagcaggccaggtacacccgctggcctccctcc

SEQ ID NO: 1912 - DNA, 31 bp, Artificial Sequence
  Synthetic polynucleotide
cccctgactgatttaggggctgggtgaccga

SEQ ID NO: 1913 - RNA, 20 nt, Artificial Sequence
  Synthetic polynucleotide
gcuuacgggcagaggccagg

SEQ ID NO: 1914 - RNA, 20 nt, Artificial Sequence
  Synthetic polynucleotide
ggucagaccaacuucagccg

SEQ ID NO: 1915 - RNA, 20 nt, Artificial Sequence
  Synthetic polynucleotide
ggguccaaaucccagaacuc

SEQ ID NO: 1916 - RNA, 20 nt, Artificial Sequence
  Synthetic polynucleotide
acacuuccuugcaggaacag

SEQ ID NO: 1917 - RNA, 20 nt, Artificial Sequence
  Synthetic polynucleotide
aucggucacccagccccuaa

SEQ ID NO: 1918 - RNA, 20 nt, Artificial Sequence
  Synthetic polynucleotide
gaggucagaccaacuucagc

SEQ ID NO: 1919 - RNA, 20 nt, Artificial Sequence
  Synthetic polynucleotide
cuccugaggaaagagcaggg

SEQ ID NO: 1920 - RNA, 20 nt, Artificial Sequence
  Synthetic polynucleotide
cugagcagcgugcaggaguc

SEQ ID NO: 1921 - RNA, 20 nt, Artificial Sequence
  Synthetic polynucleotide
cugcaaggaaguguccugug

SEQ ID NO: 1922 - RNA, 20 nt, Artificial Sequence
  Synthetic polynucleotide
ugcauccuuggcggucuugg

SEQ ID NO: 1923 - RNA, 20 nt, Artificial Sequence
  Synthetic polynucleotide
agcagcgugcaggaguccca

SEQ ID NO: 1924 - RNA, 20 nt, Artificial Sequence
  Synthetic polynucleotide
cacuuccuugcaggaacaga

SEQ ID NO: 1925 - RNA, 20 nt, Artificial Sequence
  Synthetic polynucleotide
cagccccuaaaucagucagg

SEQ ID NO: 1926 - RNA, 20 nt, Artificial Sequence
  Synthetic polynucleotide
agcaggccagguacacccgc

SEQ ID NO: 1927 - RNA, 20 nt, Artificial Sequence
  Synthetic polynucleotide
cagccccuaaaucagucagg

SEQ ID NO: 1928 - RNA, 20 nt, Artificial Sequence
  Synthetic polynucleotide
auccuuggcggucuuggugg

SEQ ID NO: 1929 - RNA, 20 nt, Artificial Sequence
  Synthetic polynucleotide
cugcccguaagcacuuggug

SEQ ID NO: 1930 - RNA, 20 nt, Artificial Sequence
  Synthetic polynucleotide
gagcagcgugcaggaguccc

SEQ ID NO: 1931 - RNA, 20 nt, Artificial Sequence
  Synthetic polynucleotide
gucccagguggcccagcagg

SEQ ID NO: 1932 - RNA, 20 nt, Artificial Sequence
  Synthetic polynucleotide
cuggccucugcccguaagca

SEQ ID NO: 1933 - RNA, 20 nt, Artificial Sequence
  Synthetic polynucleotide
gccucugcccguaagcacuu

SEQ ID NO: 1934 - RNA, 20 nt, Artificial Sequence
  Synthetic polynucleotide
guuccugcaaggaagugucc

SEQ ID NO: 1935 - RNA, 20 nt, Artificial Sequence
  Synthetic polynucleotide
agugcuuacgggcagaggcc

SEQ ID NO: 1936 - RNA, 20 nt, Artificial Sequence
  Synthetic polynucleotide
gggcagaggccaggagcgcc

SEQ ID NO: 1937 - RNA, 20 nt, Artificial Sequence
  Synthetic polynucleotide
acccagccccuaaaucaguc

SEQ ID NO: 1938 - RNA, 20 nt, Artificial Sequence
  Synthetic polynucleotide
acccagccccuaaaucaguc

SEQ ID NO: 1939 - RNA, 20 nt, Artificial Sequence
  Synthetic polynucleotide
ugcauccuuggcggucuugg

SEQ ID NO: 1940 - RNA, 20 nt, Artificial Sequence
  Synthetic polynucleotide
gcauccuuggcggucuuggu

SEQ ID NO: 1941 - RNA, 20 nt, Artificial Sequence
  Synthetic polynucleotide
ccagccccuaaaucagucag

SEQ ID NO: 1942 - RNA, 20 nt, Artificial Sequence
  Synthetic polynucleotide
ccagccccuaaaucagucag

SEQ ID NO: 1943 - RNA, 20 nt, Artificial Sequence
  Synthetic polynucleotide
acacuuccuugcaggaacag

SEQ ID NO: 1944 - RNA, 20 nt, Artificial Sequence
  Synthetic polynucleotide
cucugcccguaagcacuugg

SEQ ID NO: 1945 - RNA, 20 nt, Artificial Sequence
  Synthetic polynucleotide
ucugcccguaagcacuuggu

SEQ ID NO: 1946 - RNA, 20 nt, Artificial Sequence
  Synthetic polynucleotide
gugcuccaguagucuuucag

SEQ ID NO: 1947 - RNA, 20 nt, Artificial Sequence
  Synthetic polynucleotide
cagcgugcaggagucccagg

SEQ ID NO: 1948 - RNA, 20 nt, Artificial Sequence
  Synthetic polynucleotide
ggccucugcccguaagcacu

SEQ ID NO: 1949 - RNA, 20 nt, Artificial Sequence
  Synthetic polynucleotide
ggugcuccaguagucuuuca

SEQ ID NO: 1950 - RNA, 20 nt, Artificial Sequence
  Synthetic polynucleotide
gagcagcgugcaggaguccc

SEQ ID NO: 1951 - RNA, 20 nt, Artificial Sequence
  Synthetic polynucleotide
gcggguguaccuggccugcu

SEQ ID NO: 1952 - RNA, 20 nt, Artificial Sequence
  Synthetic polynucleotide
acggugcuccaguagucuuu

SEQ ID NO: 1953 - RNA, 20 nt, Artificial Sequence
  Synthetic polynucleotide
guccaaaucccagaacucag

SEQ ID NO: 1954 - RNA, 20 nt, Artificial Sequence
  Synthetic polynucleotide
cagcuucaugcaggguuaca

SEQ ID NO: 1955 - RNA, 20 nt, Artificial Sequence
  Synthetic polynucleotide
cugcaaggaaguguccugug

SEQ ID NO: 1956 - RNA, 20 nt, Artificial Sequence
  Synthetic polynucleotide
gggauuuggacccugagguc

SEQ ID NO: 1957 - RNA, 20 nt, Artificial Sequence
  Synthetic polynucleotide
cggucacccagccccuaaau

SEQ ID NO: 1958 - RNA, 20 nt, Artificial Sequence
  Synthetic polynucleotide
acccagccccuaaaucaguc

SEQ ID NO: 1959 - RNA, 20 nt, Artificial Sequence
  Synthetic polynucleotide
uaccuggagcagcugccucu

SEQ ID NO: 1960 - RNA, 20 nt, Artificial Sequence
  Synthetic polynucleotide
acccagccccuaaaucaguc

SEQ ID NO: 1961 - RNA, 20 nt, Artificial Sequence
  Synthetic polynucleotide
gugcuuacgggcagaggcca

SEQ ID NO: 1962 - RNA, 20 nt, Artificial Sequence
  Synthetic polynucleotide
gaagcuccugaggaaagagc

SEQ ID NO: 1963 - RNA, 20 nt, Artificial Sequence
  Synthetic polynucleotide
agugcuuacgggcagaggcc

SEQ ID NO: 1964 - RNA, 20 nt, Artificial Sequence
  Synthetic polynucleotide
ucuuuccucaggagcuucag

SEQ ID NO: 1965 - RNA, 20 nt, Artificial Sequence
  Synthetic polynucleotide
cuggccugcugggccaccug

SEQ ID NO: 1966 - RNA, 20 nt, Artificial Sequence
  Synthetic polynucleotide
ggccucugcccguaagcacu

SEQ ID NO: 1967 - RNA, 20 nt, Artificial Sequence
  Synthetic polynucleotide
cccagccccuaaaucaguca

SEQ ID NO: 1968 - RNA, 20 nt, Artificial Sequence
  Synthetic polynucleotide
cccagccccuaaaucaguca

SEQ ID NO: 1969 - RNA, 20 nt, Artificial Sequence
  Synthetic polynucleotide
cacccagccccuaaaucagu

SEQ ID NO: 1970 - RNA, 20 nt, Artificial Sequence
  Synthetic polynucleotide
auggcaccucuguuccugca

SEQ ID NO: 1971 - RNA, 20 nt, Artificial Sequence
  Synthetic polynucleotide
accuggagcagcugccucua

SEQ ID NO: 1972 - RNA, 20 nt, Artificial Sequence
  Synthetic polynucleotide
cccugaggucagaccaacuu

SEQ ID NO: 1973 - RNA, 20 nt, Artificial Sequence
  Synthetic polynucleotide
ccucaggagcuucagaggcc

SEQ ID NO: 1974 - RNA, 20 nt, Artificial Sequence
  Synthetic polynucleotide
gggcagaggccaggagcgcc

SEQ ID NO: 1975 - RNA, 20 nt, Artificial Sequence
  Synthetic polynucleotide
ggagucccagguggcccagc

SEQ ID NO: 1976 - RNA, 20 nt, Artificial Sequence
  Synthetic polynucleotide
cggugcuccaguagucuuuc

SEQ ID NO: 1977 - RNA, 20 nt, Artificial Sequence
  Synthetic polynucleotide
aagcuccugaggaaagagca

SEQ ID NO: 1978 - RNA, 20 nt, Artificial Sequence
  Synthetic polynucleotide
ccuggagcagcugccucuag

SEQ ID NO: 1979 - RNA, 20 nt, Artificial Sequence
  Synthetic polynucleotide
ccaguagucuuucagggaac

SEQ ID NO: 1980 - RNA, 20 nt, Artificial Sequence
  Synthetic polynucleotide
agcggguguaccuggccugc

SEQ ID NO: 1981 - RNA, 20 nt, Artificial Sequence
  Synthetic polynucleotide
ucccagguggcccagcaggc

SEQ ID NO: 1982 - RNA, 20 nt, Artificial Sequence
  Synthetic polynucleotide
uuaccuggagcagcugccuc

SEQ ID NO: 1983 - RNA, 20 nt, Artificial Sequence
  Synthetic polynucleotide
uaccuggagcagcugccucu

SEQ ID NO: 1984 - RNA, 20 nt, Artificial Sequence
  Synthetic polynucleotide
cccagguggcccagcaggcc

SEQ ID NO: 1985 - RNA, 20 nt, Artificial Sequence
  Synthetic polynucleotide
accuggccugcugggccacc

SEQ ID NO: 1986 - RNA, 20 nt, Artificial Sequence
  Synthetic polynucleotide
uccucaggagcuucagaggc

SEQ ID NO: 1987 - RNA, 20 nt, Artificial Sequence
  Synthetic polynucleotide
gcucuuuccucaggagcuuc

SEQ ID NO: 1988 - protein, 7 aa, Artificial Sequence
  Synthetic polypeptide
PKKKRKV

SEQ ID NO: 1989 - protein, 30 aa, Artificial Sequence
  Synthetic polypeptide
MDSLLMNRRKFLYQFKNVRWAKGRRETYLC

SEQ ID NO: 1990 - DNA, 3731 bp, homo sapiens
gtccgatggggctctggtggcgtgatctgcgcgccccaggcgtcaagcacccacaccctagaaggtttccgcagcgacgtcgaggcgctcatggttgcaggcgggcgccgccgttcagttcagggtctgagcctggaggagtgagccaggcagtgagactggctcgggcgggccgggacgcgtcgttgcagcagcggctcccagctcccagccaggattccgcgcgccccttcacgcgccctgctcctgaacttcagctcctgcacagtcctccccaccgcaaggctcaaggcgccgccggcgtggaccgcgcacggcctctaggtctcctcgccaggacagcaacctctcccctggccctcatgggcaccgtcagctccaggcggtcctggtggccgctgccactgctgctgctgctgctgctgctcctgggtcccgcgggcgcccgtgcgcaggaggacgaggacggcgactacgaggagctggtgctagccttgcgttccgaggaggacggcctggccgaagcacccgagcacggaaccacagccaccttccaccgctgcgccaaggatccgtggaggttgcctggcacctacgtggtggtgctgaaggaggagacccacctctcgcagtcagagcgcactgcccgccgcctgcaggcccaggctgcccgccggggatacctcaccaagatcctgcatgtcttccatggccttcttcctggcttcctggtgaagatgagtggcgacctgctggagctggccttgaagttgccccatgtcgactacatcgaggaggactcctctgtctttgcccagagcatcccgtggaacctggagcggattacccctccacggtaccgggcggatgaataccagccccccgacggaggcagcctggtggaggtgtatctcctagacaccagcatacagagtgaccaccgggaaatcgagggcagggtcatggtcaccgacttcgagaatgtgcccgaggaggacgggacccgcttccacagacaggccagcaagtgtgacagtcatggcacccacctggcaggggtggtcagcggccgggatgccggcgtggccaagggtgccagcatgcgcagcctgcgcgtgctcaactgccaagggaagggcacggttagcggcaccctcataggcctggagtttattcggaaaagccagctggtccagcctgtggggccactggtggtgctgctgcccctggcgggtgggtacagccgcgtcctcaacgccgcctgccagcgcctggcgagggctggggtcgtgctggtcaccgctgccggcaacttccgggacgatgcctgcctctactccccagcctcagctcccgaggtcatcacagttggggccaccaatgcccaagaccagccggtgaccctggggactttggggaccaactttggccgctgtgtggacctctttgccccaggggaggacatcattggtgcctccagcgactgcagcacctgctttgtgtcacagagtgggacatcacaggctgctgcccacgtggctggcattgcagccatgatgctgtctgccgagccggagctcaccctggccgagttgaggcagagactgatccacttctctgccaaagatgtcatcaatgaggcctggttccctgaggaccagcgggtactgacccccaacctggtggccgccctgccccccagcacccatggggcaggttggcagctgttttgcaggactgtatggtcagcacactcggggcctacacggatggccacagccgtcgcccgctgcgccccagatgaggagctgctgagctgctccagtttctccaggagtgggaagcggcggggcgagcgcatggaggcccaagggggcaagctggtctgccgggcccacaacgcttttgggggtgagggtgtctacgccattgccaggtgctgcctgctaccccaggccaactgcagcgtccacacagctccaccagctgaggccagcatggggacccgtgtccactgccaccaacagggccacgtcctcacaggctgcagctcccactgggaggtggaggaccttggcacccacaagccgcctgtgctgaggccacgaggtcagcccaaccagtgcgtgggccacagggaggccagcatccacgcttcctgctgccatgccccaggtctggaatgcaaagtcaaggagcatggaatcccggcccctcaggagcaggtgaccgtggcctgcgaggagggctggaccctgactggctgcagtgccctccctgggacctcccacgtcctgggggcctacgccgtagacaacacgtgtgtagtcaggagccgggacgtcagcactacaggcagcaccagcgaaggggccgtgacagccgttgccatctgctgccggagccggcacctggcgcaggcctcccaggagctccagtgacagccccatcccaggatgggtgtctggggagggtcaagggctggggctgagctttaaaatggttccgacttgtccctctctcagccctccatggcctggcacgaggggatggggatgcttccgcctttccggggctgctggcctggcccttgagtggggcagcctccttgcctggaactcactcactctgggtgcctcctccccaggtggaggtgccaggaagctccctccctcactgtggggcatttcaccattcaaacaggtcgagctgtgctcgggtgctgccagctgctcccaatgtgccgatgtccgtgggcagaatgacttttattgagctcttgttccgtgccaggcattcaatcctcaggtctccaccaaggaggcaggattcttcccatggataggggagggggcggtaggggctgcagggacaaacatcgttggggggtgagtgtgaaaggtgctgatggccctcatctccagctaactgtggagaagcccctgggggctccctgattaatggaggcttagctttctggatggcatctagccagaggctggagacaggtgcgcccctggtggtcacaggctgtgccttggtttcctgagccacctttactctgctctatgccaggctgtgctagcaacacccaaaggtggcctgcggggagccatcacctaggactgactcggcagtgtgcagtggtgcatgcactgtctcagccaacccgctccactacccggcagggtacacattcgcacccctacttcacagaggaagaaacctggaaccagagggggcgtgcctgccaagctcacacagcaggaactgagccagaaacgcagattgggctggctctgaagccaagcctcttcttacttcacccggctgggctcctcatttttacgggtaacagtgaggctgggaaggggaacacagaccaggaagctcggtgagtgatggcagaacgatgcctgcaggcatggaactttttccgttatcacccaggcctgattcactggcctggcggagatgcttctaaggcatggtcgggggagagggccaacaactgtccctccttgagcaccagccccacccaagcaagcagacatttatcttttgggtctgtcctctctgttgcctttttacagccaacttttctagacctgttttgcttttgtaacttgaagatatttattctgggttttgtagcatttttattaatatggtgactttttaaaataaaaacaaacaaacgttgtcctaacaaaaaaaaaaaaaaaaaaaaa

SEQ ID NO: 1991 - protein, 692 aa, homo sapiens
MGTVSSRRSWWPLPLLLLLLLLLGPAGARAQEDEDGDYEELVLALRSEEDGLAEAPEHGTTATFHRCAKDPWRLPGTYVVVLKEETHLSQSERTARRLQAQAARRGYLTKILHVFHGLLPGFLVKMSGDLLELALKLPHVDYIEEDSSVFAQSIPWNLERITPPRYRADEYQPPDGGSLVEVYLLDTSIQSDHREIEGRVMVTDFENVPEEDGTRFHRQASKCDSHGTHLAGVVSGRDAGVAKGASMRSLRVLNCQGKGTVSGTLIGLEFIRKSQLVQPVGPLVVLLPLAGGYSRVLNAACQRLARAGVVLVTAAGNFRDDACLYSPASAPEVITVGATNAQDQPVTLGTLGTNFGRCVDLFAPGEDIIGASSDCSTCFVSQSGTSQAAAHVAGIAAMMLSAEPELTLAELRQRLIHFSAKDVINEAWFPEDQRVLTPNLVAALPPSTHGAGWQLFCRTVWSAHSGPTRMATAVARCAPDEELLSCSSFSRSGKRRGERMEAQGGKLVCRAHNAFGGEGVYAIARCCLLPQANCSVHTAPPAEASMGTRVHCHQQGHVLTGCSSHWEVEDLGTHKPPVLRPRGQPNQCVGHREASIHASCCHAPGLECKVKEHGIPAPQEQVTVACEEGWTLTGCSALPGTSHVLGAYAVDNTCVVRSRDVSTTGSTSEGAVTAVAICCRSRHLAQASQELQ

SEQ ID NO: 1992 - protein, 694 aa, Mus musculus
MGTHCSAWLRWPLLPLLPPLLLLLLLLCPTGAGAQDEDGDYEELMLALPSQEDGLADEAAHVATATFRRCSKEAWRLPGTYIVVLMEETQRLQIEQTAHRLQTRAARRGYVIKVLHIFYDLFPGFLVKMSSDLLGLALKLPHVEYIEEDSFVFAQSIPWNLERIIPAWHQTEEDRSPDGSSQVEVYLLDTSIQGAHREIEGRVTITDFNSVPEEDGTRFHRQASKCDSHGTHLAGVVSGRDAGVAKGTSLHSLRVLNCQGKGTVSGTLIGLEFIRKSQLIQPSGPLVVLLPLAGGYSRILNAACRHLARTGVVLVAAAGNFRDDACLYSPASAPEVITVGATNAQDQPVTLGTLGTNFGRCVDLFAPGKDIIGASSDCSTCFMSQSGTSQAAAHVAGIVARMLSREPTLTLAELRQRLIHFSTKDVINMAWFPEDQQVLTPNLVATLPPSTHETGGQLLCRTVWSAHSGPTRTATATARCAPEEELLSCSSFSRSGRRRGDWIEAIGGQQVCKALNAFGGEGVYAVARCCLVPRANCSIHNTPAARAGLETHVHCHQKDHVLTGCSFHWEVEDLSVRRQPALRSRRQPGQCVGHQAASVYASCCHAPGLECKIKEHGISGPSEQVTVACEAGWTLTGCNVLPGASLTLGAYSVDNLCVARVHDTARADRTSGEATVAAAICCRSRPSAKASWVQ

SEQ ID NO: 1993 - protein, 691 aa, Rattus rattus
MGIRCSTWLRWPLSPQLLLLLLLCPTGSRAQDEDGDYEELMLALPSQEDSLVDEASHVATATFRRCSKEAWRLPGTYVVVLMEETQRLQVEQTAHRLQTWAARRGYVIKVLHVFYDLFPGFLVKMSSDLLGLALKLPHVEYIEEDSLVFAQSIPWNLERIIPAWQQTEEDSSPDGSSQVEVYLLDTSIQSGHREIEGRVTITDFNSVPEEDGTRFHRQASKCDSHGTHLAGVVSGRDAGVAKGTSLHSLRVLNCQGKGTVSGTLIGLEFIRKSQLIQPSGPLVVLLPLAGGYSRILNTACQRLARTGVVLVAAAGNFRDDACLYSPASAPEVITVGATNAQDQPVTLGTLGTNFGRCVDLFAPGKDIIGASSDCSTCYMSQSGTSQAAAHVAGIVAMMLNRDPALTLAELRQRLILFSTKDVINMAWFPEDQRVLTPNRVATLPPSTQETGGQLLCRTVWSAHSGPTRTATATARCAPEEELLSCSSFSRSGRRRGDRIEAIGGQQVCKALNAFGGEGVYAVARCCLLPRVNCSIHNTPAARAGPQTPVHCHQKDHVLTGCSFHWEVENLRAQQQPLLRSRHQPGQCVGHQEASVHASCCHAPGLECKIKEHGIAGPAEQVTVACEAGWTLTGCNVLPGASLPLGAYSVDNVCVARIRDAGRADRTSEEATVAAAICCRSRPSAKASWVHQ

SEQ ID NO: 1994 - DNA, 11282 bp, Homo sapiens
gtccgatggggctctggtggcgtgatctgcgcgccccaggcgtcaagcacccacaccctagaaggtttccgcagcgacgtcgaggcgctcatggttgcaggcgggcgccgccgttcagttcagggtctgagcctggaggagtgagccaggcagtgagactggctcgggcgggccgggacgcgtcgttgcagcagcggctcccagctcccagccaggattccgcgcgccccttcacgcgccctgctcctgaacttcagctcctgcacagtcctccccaccgcaaggctcaaggcgccgccggcgtggaccgcgcacggcctctaggtctcctcgccaggacagcaacctctcccctggccctcatgggcaccgtcagctccaggcggtcctggtggccgctgccactgctgctgctgctgctgctgctcctgggtcccgcgggcgcccgtgcgcaggaggacgaggacggcgactacgaggagctggtgctagccttgcgttccgaggaggacggcctggccgaagcacccgagcacggaaccacagccaccttccaccgctgcgccaaggtgcgggtgtagggatgggaggccggggcgaacccgcagccgggacggtgcggtgctgtttcctctcgggcctcagtttccccccatgtaagagaggaagtggagtgcaggtcgccgagggctcttcgcttggcacgatcttggggactgcaggcaaggcggcgggggaggacgggtagtggggagcacggtggagagtgactttcccagcaggcctatgtcataggtactgtggtctctacaatacagcagaggtatctgaggctccgagaggttgagtgacttgctcatggctgcacaaccagtaaatattggagctggaattcaggtccacggtttcctggctccaaagcccatgattttttccctcaatttattctgactggggcatgggggagggggtggcctttgggcagggccaccaggagcgaccaggcccgtagagagctgggtgcaggtacagaggaaaacctgttgtcgagtgtggcccgtagttcccatttttgcctgaatggcacatttgaaagtgttatataaccatgtgaataataatagttggcctatatgagttctttaatttgctttttggtccgcatttggtaacttctttatcatctactatactctgttgtgtctcttttgttgtaatttgtaagtaggggtgagataaagtacacctagggtttgctgggtttcttccatgtcatcatgttcctccttgcatggggccaggatccgtggaggttgcctggcacctacgtggtggtgctgaaggaggagacccacctctcgcagtcagagcgcactgcccgccgcctgcaggcccaggctgcccgccggggatacctcaccaagatcctgcatgtcttccatggccttcttcctggcttcctggtgaagatgagtggcgacctgctggagctggtgagccaccctttttgggaatggcacttcctgatagggctgggccactgcatatacactggggactgtgcttagtaggcccattgctgaaaatcagaaggggacagcaagtatgtattgagcacttatcgggtaccaagcacagtaactactggctttctgtatagaattccctttaagcctggccatgccccagtggtacgtctatcttcatttgaaagacgaggagactgaagttcagaggggaccacacagacagctgatgcactcttgtctgcaagggagctggtgctgcagtttgcactgagcaggctggagaaggctggagaatagactaggggacaaaccgaattgccagtgctgttatgtcatgatttaggcatggagtccagggcctgagcttcactccatgtccatcctgcccagagccttggcacagcctggctcccagacaagatgtcaagttcagaatccttcctaaaaggaatcctctatgccagaccgtgttgcagggatatgggagtgctgggctcccagcctgatcaaggagcgagaaaactcaggctcctagtctgtcctccggggcactagcagggacaaggtgggaggctgctgggctgggatgtggggacaggtttgatcaggtaaggccaggctgtggctgtgtttgctgctgtccaaatggcttaagcagagtcccccggcctctctggcttctgcaggccttgaagttgccccatgtcgactacatcgaggaggactcctctgtctttgcccagagcatcccgtggaacctggagcggattacccctccacggtaccgggcggatgaataccagccccccggtaagacccccatctgtgccctgccccaccccatctgagctgaatccatttgctctgccctggcctggcctccctgctggtggtttccacttctcggggggctttgggactcagcacctccactgacccctttttttctgtcccatccccatcccctgcagcccccactgcctgccttcctgttgccccacaaatgcaaaagtcttgccttaaatgatcctcttttccttcttttctcttgttttccttttctcaccatttggaatggcccagcaggctgcacttaccttggaaggagggttcatctgatggtgactctacctagggcccccaggcctctataactaacgcttggacctggagccaggaggcccagacatacatcctgtccgagctgcagcttcctgtctctaaaatgagccggccagcgcaggtggccagacatcactgttattctcctttgagtctttaaatcttgttgtctttcttgcagactcggtgagctgtgaaaggctataataggggctttattttacactttgatactattttttgaacattcatattattgttagatattgatattcatatgaaggagcaggatgacttgggtccttcttggcagtagcattgccagctgatggccttggacagttacctgccctctctaggcctccctttccttgtctatgaaatacattatagaataggatgtagtgtgtgaggattttttggaggttaaacgagtgaatatatttaaggcgctttcaccagtgcctgggatgtgctctgtagtttctgtgtgttaactataaggttgactttatgctcattccctcctctcccacaaatgtcgccttggaaagacggaggcagcctggtggaggtgtatctcctagacaccagcatacagagtgaccaccgggaaatcgagggcagggtcatggtcaccgacttcgagaatgtgcccgaggaggacgggacccgcttccacagacaggtaagcacggccgtctgatgggagggctgcctctgcccatatccccatcctggaggtgggtggggactgccaccccagagcgttgcagctgtactcctgggttgcaccccccccagctgtcactgtcccctccctgccatcagttgtgggaagggcgttcatccatccagccacctgctgatttgttatagggtggagggggggtctttctcatgtggtccttgtgttcgtcgagcaggccagcaagtgtgacagtcatggcacccacctggcaggggtggtcagcggccgggatgccggcgtggccaagggtgccagcatgcgcagcctgcgcgtgctcaactgccaagggaagggcacggttagcggcaccctcataggtaagtgatggccccagacgctggtctctctccatctggacctggcctgggaggtggcttgggctgggcccagggagagctaatgtctcctaaccaagaatgctgtggcagcctctgccgcagagccagagaaccagagtgccaaggctggcagggttcccagtggccacgagtgcagatgaagaaacccaggccccaagagggtcatgcaggtagcccagggagttcagccttgaccctgggtcaatgacaccagtaggatgtatatattaagagtttcaagctcatgtgaccgtgcgggctggcaagtctgaaatccgcagggcaggccaggcaggctggcaattcctgcagaatttgatgttgcaatactgagtcctaaggcagtcctggggcagaattccttcttccctgggaggcctcagtctgttctcttaaggccttcaactgattaaatgaggcctgcccaagttatagagagtaacctgccttactccgtcttctgatttaaatgttagtcacatctaaaaaatattttcgcagcagcatttccactggcttttgaccaaacatcaggccacaaagttgatccccaaaattaaccatcactctgtgcctgtaagggaggggctgggaaaggggagcaggtctccccaaggggtgaccttggctttgttcctcccaggcctggagtttattcggaaaagccagctggtccagcctgtggggccactggtggtgctgctgcccctggcgggtgggtacagccgcgtcctcaacgccgcctgccagcgcctggcgagggctggggtcgtgctggtcaccgctgccggcaacttccgggacgatgcctgcctctactccccagcctcagctcccgaggtaggtgctggggctgctgccccaaggcgcgggtagggggcggagggcggagggcggagggagggcgggcgggcaggcgggcttcttgtggcacgtgggcttcttgtggcacgttcctggaggccgaacccttctggctttggaaggagtcgtcagagacccccgccatgcgggaggctggggaggaaggggctcgaaacctccatcatcgcagagtctgaatagcagtggccccgccatgcgcccacgtagcggcgcctacgtagccacgcccccacaccccgtcctggccactctccctcctgaaggtcttctggtacccgccccctccccatctccatccccaggccctgcgtcctctgcccaatactctttgggcctccctgttgtccagctctctccgcggctccatgactgacaacttgagcaaggctaatgtgaatgggagcggttgagggctcagacctctcacccgaggaacatccacagagtgtgccgcatgcccggtgcagtgtggctgcggggacacagacacggagcctcggccctgaggagctggggggcagtgaccgtccctcctctgacccaccactcctccagtgtcaggacactgcgggtatctaggggaaggaatcttgttccacttcaagtctggaacttcaagtctgtgtgtgtgcgtgcgcgcgcgcgcgttgggggtgggggttgcagagcagatgcgtacctgacagcggtaacctaggtcccccctggcctatcaaggcttccctggcggccgaatttaaaggcatcaagcaaacaaagcccaacacatctctgccttgtcctctcagtttccccccgtggcacttagaaccacttgatacaccgaatagtttcctatctcccccactaggatgtaaactccacaggggcattgggaatgctgcctggctatggtagggacagaggggagcaccagggcggggcaggggtgccagagttctgcctgggcagtcagattttccttaggaggggacatttgagtgggacccaaacaggtgtatagcagttgtccagcccagctggcaaggcctgagtctgcctctgcaacccctctcttgggctcctttctctgccacccacctcctcacctttccaggtcatcacagttggggccaccaatgcccaagaccagccggtgaccctggggactttggggaccaactttggccgctgtgtggacctctttgccccaggggaggacatcattggtgcctccagcgactgcagcacctgctttgtgtcacagagtgggacatcacaggctgctgcccacgtggctggtaagtcaccaccccactgcctcggccaccgtgatgctaacagcccctttggcagtcagggtctgtgccgggacctccagtgccaggctctgtgcagggggaccagagatgaagtaggcctgatggtgccttcaaggacactcagtctgatgagggaggcgagtgcacagaggaaacacgaggtcagggctgtattagagggagcccagaggaggcacctgcccagcccgagggtcagagaaggcatcttggaggagggacatttgatcgggagcttgatggatgaataggagttcacctggccgataagacagcaactaccaaggcttagaggtgtgagaggaggctgtcttacctcactgagtaaggactgcaggcggcttaccttcgagaagagagcttagtgtctgtgtgcacgtgtgtttgtgtgtatgtgtgtgcgtgtgtgcactggcaggagtcccctgctggggcaggagggccgggccatcaccatctttcaccattcacccctgcaccaggcattgcagccatgatgctgtctgccgagccggagctcaccctggccgagttgaggcagagactgatccacttctctgccaaagatgtcatcaatgaggcctggttccctgaggaccagcgggtactgacccccaacctggtggccgccctgccccccagcacccatggggcaggtaagcaggatggcagggtgggcaagtccaggctggggcttgggaggtctgtgtgaccttgacagtctctcccttctcccttgtctgtgtaaggaggatgacgccaccttaaataggattaaatgagaatggggctctgaaagggctgtgcaatattttcataacgtgtttttatagagacagttgagtatgttctttaagccctcctctctcctaccatgaactaaagatttctgtggaggtcccctcactcccagcaccccctcctcatcccaggccctttttgcaggttggcagctgttttgcaggactgtatggtcagcacactcggggcctacacggatggccacagccgtcgcccgctgcgccccagatgaggagctgctgagctgctccagtttctccaggagtgggaagcggcggggcgagcgcatggaggtgactgtacccctccttcgtgtgtgtgtgtgtgtgtgtgtgtgtgtgtgtgtgtgtgtgtgtgtgtgtgtcagtgctgggccctcagggacccccagcaagcccctccatcctccagactccagctcttctgtaagcttacagggctggccagaccaggagtggggcactcctcacttcacgcggctgggggctgctggagagagccacagcgggaagggtttcctagaggctgcaggacagtgctggatggattttcaatgctcacctgggtgtgagcgtgcggcagggccgcgtgagggtcagcgatctgctactctggactcagccatctctaggcccctctcactcaggtgctccatggttctgggagctgagaaatctcaaaccagcaaaaaagtggaattgatgttgatgctacaggatagtgcacagatgccatctggttgcagcattttggtggaagggcagtgcccagctaggagagtgaggaggggcaggcatttctggcttgaggagatggggtcttaatgctcgtgtgagaggcagagtgggtggagtggagctggctggatccttgctttggcctcctggatttctctctatctccattttgaaaccactctgtgtttggaagaacttttgagtattcagagctgcccactggcagaacagtcttccttgggcaggagtgagctccttgtccccagaaggctgggtctggctggcccctggcagggacactgatgagggtgcttgagttgatcctgtctagtccctttctgtgttttcaaagcccattctaaagcagattcccatttccgtctttgactctaaggcccaagggggcaagctggtctgccgggcccacaacgcttttgggggtgagggtgtctacgccattgccaggtgctgcctgctaccccaggccaactgcagcgtccacacagctccaccagctgaggccagcatggggacccgtgtccactgccaccaacagggccacgtcctcacaggtaggaggctgggcttgccctggggtgaggaggggtctctttctccttatgcacccactgcccgcgaggcttggtcctcacaagtgtgatccatgagactcaagcctgacttgcagttccatactctggttctgccacttccatgccctttgagcctgggcaggtgaccttacttctcctcatctcagcttcctcctccataagagggaaaaaggtattacctgcctcaaatgccaggctccatgctggggcttcgcacgtgtcatcttcacagtgtccctgtgagtaggtgtggtttctctttccatcttacaaatgagtaaacagagcctcagtgtagctaagtaaccactattttaggtttcttagccaatgggtgtgtctgactcctaagcccatggagggcattctgaggtggttcagacagaccccggcttacccttgaacttctgcctgctggctgcatagggaggggctggggggagtttgagcatctcaggccatagagcccctgcctcactgtctccatctctgggtggaaagatggtgttttccctgagaaactaaggctcagagaggttgaatggctctcccaaggtcacacagctggtcagctgcagagttgagaacacaggagtcctggtgctcaggccagcatctctttttttctttgagttgtttctaggtttcctagctcttgcctcagaccttaaagagagagggtctgatggggatgggcactggagacggagcatcccagcatttcacatctgagctggctttcctctgccccaggctgcagctcccactgggaggtggaggaccttggcacccacaagccgcctgtgctgaggccacgaggtcagcccaaccagtgcgtgggccacagggaggccagcatccacgcttcctgctgccatgccccaggtctggaatgcaaagtcaaggagcatggaatcccggcccctcaggagcaggtgaagaggcccgtgaggccgggtgggtggggtgctgcgtgtctctcctgcacagcttttctgtgtcagtttgtgccaccaccataccgccatgcatcagggtggcggtttgccaggtagatgctgtgggcagcttccgccattgtgtggacagcatgtatatgtgtctctgtgtggctgggtctgtttttgcttttgtccagatcagtaaggtttgctacctgggtaccccactccacttggagtagaatgtgcataaatatggcataaagaaatgcaatatgcaggcggtggagggtccaggcgttggggcggggctcaggctggagtctgaagggagcctgcaggcctggtgggtggatgtgggtgggagagggggaggatggcaccaaggctcgggcccctggacagatggagttgccattaagtgggatggggcaggctatggggccatcagtttcagagggatgagtttggcactggcatggtaggcatctgtctatctccacggccctcaaaccaggcatgaagcaggagctcacgtgtttggtcagccatggtgcagaaccgcctgggtgggaggtgcggggtgggagatacacggttgtgtcccaaatgggctctgagccagcgagggccgtctgcactttggcctcacagaaggatgtcggagggagaaatgaagtgtgggtgggggtcccgggccacgctagacatgtgctttcttttcctcgggctctggcaggtgaccgtggcctgcgaggagggctggaccctgactggctgcagtgccctccctgggacctcccacgtcctgggggcctacgccgtagacaacacgtgtgtagtcaggagccgggacgtcagcactacaggcagcaccagcgaaggggccgtgacagccgttgccatctgctgccggagccggcacctggcgcaggcctcccaggagctccagtgacagccccatcccaggatgggtgtctggggagggtcaagggctggggctgagctttaaaatggttccgacttgtccctctctcagccctccatggcctggcacgaggggatggggatgcttccgcctttccggggctgctggcctggcccttgagtggggcagcctccttgcctggaactcactcactctgggtgcctcctccccaggtggaggtgccaggaagctccctccctcactgtggggcatttcaccattcaaacaggtcgagctgtgctcgggtgctgccagctgctcccaatgtgccgatgtccgtgggcagaatgacttttattgagctcttgttccgtgccaggcattcaatcctcaggtctccaccaaggaggcaggattcttcccatggataggggagggggcggtaggggctgcagggacaaacatcgttggggggtgagtgtgaaaggtgctgatggccctcatctccagctaactgtggagaagcccctgggggctccctgattaatggaggcttagctttctggatggcatctagccagaggctggagacaggtgcgcccctggtggtcacaggctgtgccttggtttcctgagccacctttactctgctctatgccaggctgtgctagcaacacccaaaggtggcctgcggggagccatcacctaggactgactcggcagtgtgcagtggtgcatgcactgtctcagccaacccgctccactacccggcagggtacacattcgcacccctacttcacagaggaagaaacctggaaccagagggggcgtgcctgccaagctcacacagcaggaactgagccagaaacgcagattgggctggctctgaagccaagcctcttcttacttcacccggctgggctcctcatttttacgggtaacagtgaggctgggaaggggaacacagaccaggaagctcggtgagtgatggcagaacgatgcctgcaggcatggaactttttccgttatcacccaggcctgattcactggcctggcggagatgcttctaaggcatggtcgggggagagggccaacaactgtccctccttgagcaccagccccacccaagcaagcagacatttatcttttgggtctgtcctctctgttgcctttttacagccaacttttctagacctgttttgcttttgtaacttgaagatatttattctgggttttgtagcatttttattaatatggtgactttttaaaataaaaacaaacaaacgttgtcctaac

SEQ ID NO: 1995 - RNA, 100 nt, Artificial Sequence
  Synthetic polynucleotide
  misc_feature (1)..(20): n is a, c, g, or u
nnnnnnnnnnnnnnnnnnnnguuuuagagcuagaaauagcaaguuaaaauaaggcuaguccguuaucaacuugaaaaaguggcaccgacucggugcuuuu

SEQ ID NO: 1996 - protein, 36 aa, Artificial Sequence
  Synthetic Polypeptide
  misc_feature (2)..(2): Xaa can be any naturally occurring amino acid
  misc_feature (4)..(26): Xaa can be any naturally occurring amino acid
  MISC_FEATURE (27)..(29): Xaa may be absent
  misc_feature (32)..(33): Xaa can be any naturally occurring amino acid
  MISC_FEATURE (34)..(35): Xaa may be absent
HXEXXXXXXXXXXXXXXXXXXXXXXXXXXPCXXXXC

SEQ ID NO: 1997 - RNA, 82 nt, Artificial Sequence
  Synthetic polynucleotide
guuuuagagcuagaaauagcaaguuaaaauaaaggcuaguccguuaucaacuugaaaaaguggcaccgagucggugcuuuuu

SEQ ID NO: 1998 - protein, 4 aa, Artificial Sequence
  Synthetic polypeptide
GGGS

SEQ ID NO: 1999 - protein, 1388 aa, Artificial Sequence
  Synthetic Polypeptide
MTKPYSIGLAIGTNSVGWAVITDNYKVPSKKMKVLGNTSKKYIKKNLLGVLLFDSGITAEGRRLKRTARRRYTRRRNRILYLQEIFSTEMATLDDAFFQRLDDSFLVPDDKRDSKYPIFGNLVEEKVYHDEFPTIYHLRKYLADSTKKADLRLVYLALAHMIKYRGHFLIEGEFNSKNNDIQKNFQDFLDTYNAIFESDLSLENSKQLEEIVKDKISKLEKKDRILKLFPGEKNSGIFSEFLKLIVGNQADFRKCFNLDEKASLHFSKESYDEDLETLLGYIGDDYSDVFLKAKKLYDAILLSGFLTVTDNETEAPLSSAMIKRYNEHKEDLALLKEYIRNISLKTYNEVFKDDTKNGYAGYIDGKTNQEDFYVYLKNLLAEFEGADYFLEKIDREDFLRKQRTFDNGSIPYQIHLQEMRAILDKQAKFYPFLAKNKERIEKILTFRIPYYVGPLARGNSDFAWSIRKRNEKITPWNFEDVIDKESSAEAFINRMTSFDLYLPEEKVLPKHSLLYETFNVYNELTKVRFIAESMRDYQFLDSKQKKDIVRLYFKDKRKVTDKDIIEYLHAIYGYDGIELKGIEKQFNSSLSTYHDLLNIINDKEFLDDSSNEAIIEEIIHTLTIFEDREMIKQRLSKFENIFDKSVLKKLSRRHYTGWGKLSAKLINGIRDEKSGNTILDYLIDDGISNRNFMQLIHDDALSFKKKIQKAQIIGDEDKGNIKEVVKSLPGSPAIKKGILQSIKIVDELVKVMGGRKPESIVVEMARENQYTNQGKSNSQQRLKRLEKSLKELGSKILKENIPAKLSKIDNNALQNDRLYLYYLQNGKDMYTGDDLDIDRLSNYDIDHIIPQAFLKDNSIDNKVLVSSASNRGKSDDFPSLEVVKKRKTFWYQLLKSKLISQRKFDNLTKAERGGLLPEDKAGFIQRQLVETRQITKHVARLLDEKFNNKKDENNRAVRTVKIITLKSTLVSQFRKDFELYKVREINDFHHAHDAYLNAVIASALLKKYPKLEPEFVYGDYPKYNSFRERKSATEKVYFYSNIMNIFKKSISLADGRVIERPLIEVNEETGESVWNKESDLATVRRVLSYPQVNVVKKVEEQNHGLDRGKPKGLFNANLSSKPKPNSNENLVGAKEYLDPKKYGGYAGISNSFAVLVKGTIEKGAKKKITNVLEFQGISILDRINYRKDKLNFLLEKGYKDIELIIELPKYSLFELSDGSRRMLASILSTNNKRGEIHKGNQIFLSQKFVKLLYHAKRISNTINENHRKYVENHKKEFEELFYYILEFNENYVGAKKNGKLLNSAFQSWQNHSIDELCSSFIGPTGSERKGLFELTSRGSAADFEFLGVKIPRYRDYTPSSLLKDATLIHQSVTGLYETRIDLAKLGEG

SEQ ID NO: 2000 - protein, 1368 aa, Artificial Sequence
  Synthetic Polypeptide
MDKKYSIGLAIGTNSVGWAVITDEYKVPSKKFKVLGNTDRHSIKKNLIGALLFDSGETAEATRLKRTARRRYTRRKNRICYLQEIFSNEMAKVDDSFFHRLEESFLVEEDKKHERHPIFGNIVDEVAYHEKYPTIYHLRKKLVDSTDKADLRLIYLALAHMIKFRGHFLIEGDLNPDNSDVDKLFIQLVQTYNQLFEENPINASGVDAKAILSARLSKSRRLENLIAQLPGEKKNGLFGNLIALSLGLTPNFKSNFDLAEDAKLQLSKDTYDDDLDNLLAQIGDQYADLFLAAKNLSDAILLSDILRVNTEITKAPLSASMIKRYDEHHQDLTLLKALVRQQLPEKYKEIFFDQSKNGYAGYIDGGASQEEFYKFIKPILEKMDGTEELLVKLNREDLLRKQRTFDNGSIPHQIHLGELHAILRRQEDFYPFLKDNREKIEKILTFRIPYYVGPLARGNSRFAWMTRKSEETITPWNFEEVVDKGASAQSFIERMTNFDKNLPNEKVLPKHSLLYEYFTVYNELTKVKYVTEGMRKPAFLSGEQKKAIVDLLFKTNRKVTVKQLKEDYFKKIECFDSVEISGVEDRFNASLGTYHDLLKIIKDKDFLDNEENEDILEDIVLTLTLFEDREMIEERLKTYAHLFDDKVMKQLKRRRYTGWGRLSRKLINGIRDKQSGKTILDFLKSDGFANRNFMQLIHDDSLTFKEDIQKAQVSGQGDSLHEHIANLAGSPAIKKGILQTVKVVDELVKVMGRHKPENIVIEMARENQTTQKGQKNSRERMKRIEEGIKELGSQILKEHPVENTQLQNEKLYLYYLQNGRDMYVDQELDINRLSDYDVDHIVPQSFLKDDSIDNKVLTRSDKNRGKSDNVPSEEVVKKMKNYWRQLLNAKLITQRKFDNLTKAERGGLSELDKAGFIKRQLVETRQITKHVAQILDSRMNTKYDENDKLIREVKVITLKSKLVSDFRKDFQFYKVREINNYHHAHDAYLNAVVGTALIKKYPKLESEFVYGDYKVYDVRKMIAKSEQEIGKATAKYFFYSNIMNFFKTEITLANGEIRKRPLIETNGETGEIVWDKGRDFATVRKVLSMPQVNIVKKTEVQTGGFSKESILPKRNSDKLIARKKDWDPKKYGGFVSPTVAYSVLVVAKVEKGKSKKLKSVKELLGITIMERSSFEKNPIDFLEAKGYKEVKKDLIIKLPKYSLFELENGRKRMLASARELQKGNELALPSKYVNFLYLASHYEKLKGSPEDNEQKQLFVEQHKHYLDEIIEQISEFSKRVILADANLDKVLSAYNKHRDKPIREQAENIIHLFTLTNLGAPAAFKYFDTTIDRKEYRSTKEVLDATLIHQSITGLYETRIDLSQLGGD

SEQ ID NO: 2001 - protein, 1368 aa, Artificial Sequence
  Synthetic Polypeptide
MDKKYSIGLAIGTNSVGWAVITDEYKVPSKKFKVLGNTDRHSIKKNLIGALLFDSGETAEATRLKRTARRRYTRRKNRICYLQEIFSNEMAKVDDSFFHRLEESFLVEEDKKHERHPIFGNIVDEVAYHEKYPTIYHLRKKLVDSTDKADLRLIYLALAHMIKFRGHFLIEGDLNPDNSDVDKLFIQLVQTYNQLFEENPINASGVDAKAILSARLSKSRRLENLIAQLPGEKKNGLFGNLIALSLGLTPNFKSNFDLAEDAKLQLSKDTYDDDLDNLLAQIGDQYADLFLAAKNLSDAILLSDILRVNTEITKAPLSASMIKRYDEHHQDLTLLKALVRQQLPEKYKEIFFDQSKNGYAGYIDGGASQEEFYKFIKPILEKMDGTEELLVKLNREDLLRKQRTFDNGSIPHQIHLGELHAILRRQEDFYPFLKDNREKIEKILTFRIPYYVGPLARGNSRFAWMTRKSEETITPWNFEEVVDKGASAQSFIERMTNFDKNLPNEKVLPKHSLLYEYFTVYNELTKVKYVTEGMRKPAFLSGEQKKAIVDLLFKTNRKVTVKQLKEDYFKKIECFDSVEISGVEDRFNASLGTYHDLLKIIKDKDFLDNEENEDILEDIVLTLTLFEDREMIEERLKTYAHLFDDKVMKQLKRRRYTGWGRLSRKLINGIRDKQSGKTILDFLKSDGFANRNFMQLIHDDSLTFKEDIQKAQVSGQGDSLHEHIANLAGSPAIKKGILQTVKVVDELVKVMGRHKPENIVIEMARENQTTQKGQKNSRERMKRIEEGIKELGSQILKEHPVENTQLQNEKLYLYYLQNGRDMYVDQELDINRLSDYDVDHIVPQSFLKDDSIDNKVLTRSDKNRGKSDNVPSEEVVKKMKNYWRQLLNAKLITQRKFDNLTKAERGGLSELDKAGFIKRQLVETRQITKHVAQILDSRMNTKYDENDKLIREVKVITLKSKLVSDFRKDFQFYKVREINNYHHAHDAYLNAVVGTALIKKYPKLESEFVYGDYKVYDVRKMIAKSEQEIGKATAKYFFYSNIMNFFKTEITLANGEIRKRPLIETNGETGEIVWDKGRDFATVRKVLSMPQVNIVKKTEVQTGGFSKESILPKRNSDKLIARKKDWDPKKYGGFVSPTVAYSVLVVAKVEKGKSKKLKSVKELLGITIMERSSFEKNPIDFLEAKGYKEVKKDLIIKLPKYSLFELENGRKRMLASAGELQKGNELALPSKYVNFLYLASHYEKLKGSPEDNEQKQLFVEQHKHYLDEIIEQISEFSKRVILADANLDKVLSAYNKHRDKPIREQAENIIHLFTLTNLGAPAAFKYFDTTIDRKQYRSTKEVLDATLIHQSITGLYETRIDLSQLGGD

SEQ ID NO: 2002 - protein, 1368 aa, Artificial Sequence
  Synthetic Polypeptide
MDKKYSIGLAIGTNSVGWAVITDEYKVPSKKFKVLGNTDRHSIKKNLIGALLFDSGETAEATRLKRTARRRYTRRKNRICYLQEIFSNEMAKVDDSFFHRLEESFLVEEDKKHERHPIFGNIVDEVAYHEKYPTIYHLRKKLVDSTDKADLRLIYLALAHMIKFRGHFLIEGDLNPDNSDVDKLFIQLVQTYNQLFEENPINASGVDAKAILSARLSKSRRLENLIAQLPGEKKNGLFGNLIALSLGLTPNFKSNFDLAEDAKLQLSKDTYDDDLDNLLAQIGDQYADLFLAAKNLSDAILLSDILRVNTEITKAPLSASMIKRYDEHHQDLTLLKALVRQQLPEKYKEIFFDQSKNGYAGYIDGGASQEEFYKFIKPILEKMDGTEELLVKLNREDLLRKQRTFDNGSIPHQIHLGELHAILRRQEDFYPFLKDNREKIEKILTFRIPYYVGPLARGNSRFAWMTRKSEETITPWNFEEVVDKGASAQSFIERMTNFDKNLPNEKVLPKHSLLYEYFTVYNELTKVKYVTEGMRKPAFLSGEQKKAIVDLLFKTNRKVTVKQLKEDYFKKIECFDSVEISGVEDRFNASLGTYHDLLKIIKDKDFLDNEENEDILEDIVLTLTLFEDREMIEERLKTYAHLFDDKVMKQLKRRRYTGWGRLSRKLINGIRDKQSGKTILDFLKSDGFANRNFMQLIHDDSLTFKEDIQKAQVSGQGDSLHEHIANLAGSPAIKKGILQTVKVVDELVKVMGRHKPENIVIEMARENQTTQKGQKNSRERMKRIEEGIKELGSQILKEHPVENTQLQNEKLYLYYLQNGRDMYVDQELDINRLSDYDVDHIVPQSFLKDDSIDNKVLTRSDKNRGKSDNVPSEEVVKKMKNYWRQLLNAKLITQRKFDNLTKAERGGLSELDKAGFIKRQLVETRQITKHVAQILDSRMNTKYDENDKLIREVKVITLKSKLVSDFRKDFQFYKVREINNYHHAHDAYLNAVVGTALIKKYPKLESEFVYGDYKVYDVRKMIAKSEQEIGKATAKYFFYSNIMNFFKTEITLANGEIRKRPLIETNGETGEIVWDKGRDFATVRKVLSMPQVNIVKKTEVQTGGFSKESILPKRNSDKLIARKKDWDPKKYGGFESPTVAYSVLVVAKVEKGKSKKLKSVKELLGITIMERSSFEKNPIDFLEAKGYKEVKKDLIIKLPKYSLFELENGRKRMLASAGELQKGNELALPSKYVNFLYLASHYEKLKGSPEDNEQKQLFVEQHKHYLDEIIEQISEFSKRVILADANLDKVLSAYNKHRDKPIREQAENIIHLFTLTNLGAPAAFKYFDTTIDRKQYRSTKEVLDATLIHQSITGLYETRIDLSQLGGD

SEQ ID NO: 2003 - DNA, 4104 bp, Streptococcus pyogenes
atggataagaaatactcaataggcttagatatcggcacaaatagcgtcggatgggcggtgatcactgatgattataaggttccgtctaaaaagttcaaggttctgggaaatacagaccgccacagtatcaaaaaaaatcttataggggctcttttatttggcagtggagagacagcggaagcgactcgtctcaaacggacagctcgtagaaggtatacacgtcggaagaatcgtatttgttatctacaggagattttttcaaatgagatggcgaaagtagatgatagtttctttcatcgacttgaagagtcttttttggtggaagaagacaagaagcatgaacgtcatcctatttttggaaatatagtagatgaagttgcttatcatgagaaatatccaactatctatcatctgcgaaaaaaattggcagattctactgataaagcggatttgcgcttaatctatttggccttagcgcatatgattaagtttcgtggtcattttttgattgagggagatttaaatcctgataatagtgatgtggacaaactatttatccagttggtacaaatctacaatcaattatttgaagaaaaccctattaacgcaagtagagtagatgctaaagcgattctttctgcacgattgagtaaatcaagacgattagaaaatctcattgctcagctccccggtgagaagagaaatggcttgtttgggaatctcattgctttgtcattgggattgacccctaattttaaatcaaattttgatttggcagaagatgctaaattacagctttcaaaagatacttacgatgatgatttagataatttattggcgcaaattggagatcaatatgctgatttgtttttggcagctaagaatttatcagatgctattttactttcagatatcctaagagtaaatagtgaaataactaaggctcccctatcagcttcaatgattaagcgctacgatgaacatcatcaagacttgactcttttaaaagctttagttcgacaacaacttccagaaaagtataaagaaatcttttttgatcaatcaaaaaacggatatgcaggttatattgatgggggagctagccaagaagaattttataaatttatcaaaccaattttagaaaaaatggatggtactgaggaattattggtgaaactaaatcgtgaagatttgctgcgcaagcaacggacctttgacaacggctctattccccatcaaattcacttgggtgagctgcatgctattttgagaagacaagaagacttttatccatttttaaaagacaatcgtgagaagattgaaaaaatcttgacttttcgaattccttattatgttggtccattggcgcgtggcaatagtcgttttgcatggatgactcggaagtctgaagaaacaattaccccatggaattttgaagaagttgtcgataaaggtgcttcagctcaatcatttattgaacgcatgacaaactttgataaaaatcttccaaatgaaaaagtactaccaaaacatagtttgctttatgagtattttacggtttataacgaattgacaaaggtcaaatatgttactgagggaatgcgaaaaccagcatttctttcaggtgaacagaagaaagccattgttgatttactcttcaaaacaaatcgaaaagtaaccgttaagcaattaaaagaagattatttcaaaaaaatagaatgttttgatagtgttgaaatttcaggagttgaagatagatttaatgcttcattaggcgcctaccatgatttgctaaaaattattaaagataaagattttttggataatgaagaaaatgaagatatcttagaggatattgttttaacattgaccttatttgaagatagggggatgattgaggaaagacttaaaacatatgctcacctctttgatgataaggtgatgaaacagcttaaacgtcgccgttatactggttggggacgtttgtctcgaaaattgattaatggtattagggataagcaatctggcaaaacaatattagattttttgaaatcagatggttttgccaatcgcaattttatgcagctgatccatgatgatagtttgacatttaaagaagatattcaaaaagcacaggtgtctggacaaggccatagtttacatgaacagattgctaacttagctggcagtcctgctattaaaaaaggtattttacagactgtaaaaattgttgatgaactggtcaaagtaatggggcataagccagaaaatatcgttattgaaatggcacgtgaaaatcagacaactcaaaagggccagaaaaattcgcgagagcgtatgaaacgaatcgaagaaggtatcaaagaattaggaagtcagattcttaaagagcatcctgttgaaaatactcaattgcaaaatgaaaagctctatctctattatctacaaaatggaagagacatgtatgtggaccaagaattagatattaatcgtttaagtgattatgatgtcgatcacattgttccacaaagtttcattaaagacgattcaatagacaataaggtactaacgcgttctgataaaaatcgtggtaaatcggataacgttccaagtgaagaagtagtcaaaaagatgaaaaactattggagacaacttctaaacgccaagttaatcactcaacgtaagtttgataatttaacgaaagctgaacgtggaggtttgagtgaacttgataaagctggttttatcaaacgccaattggttgaaactcgccaaatcactaagcatgtggcacaaattttggatagtcgcatgaatactaaatacgatgaaaatgataaacttattcgagaggttaaagtgattaccttaaaatctaaattagtttctgacttccgaaaagatttccaattctataaagtacgtgagattaacaattaccatcatgcccatgatgcgtatctaaatgccgtcgttggaactgctttgattaagaaatatccaaaacttgaatcggagtttgtctatggtgattataaagtttatgatgttcgtaaaatgattgctaagtctgagcaagaaataggcaaagcaaccgcaaaatatttcttttactctaatatcatgaacttcttcaaaacagaaattacacttgcaaatggagagattcgcaaacgccctctaatcgaaactaatggggaaactggagaaattgtctgggataaagggcgagattttgccacagtgcgcaaagtattgtccatgccccaagtcaatattgtcaagaaaacagaagtacagacaggcggattctccaaggagtcaattttaccaaaaagaaattcggacaagcttattgctcgtaaaaaagactgggatccaaaaaaatatggtggttttgatagtccaacggtagcttattcagtcctagtggttgctaaggtggaaaaagggaaatcgaagaagttaaaatccgttaaagagttactagggatcacaattatggaaagaagttcctttgaaaaaaatccgattgactttttagaagctaaaggatataaggaagttaaaaaagacttaatcattaaactacctaaatatagtctttttgagttagaaaacggtcgtaaacggatgctggctagtgccggagaattacaaaaaggaaatgagctggctctgccaagcaaatatgtgaattttttatatttagctagtcattatgaaaagttgaagggtagtccagaagataacgaacaaaaacaattgtttgtggagcagcataagcattatttagatgagattattgagcaaatcagtgaattttctaagcgtgttattttagcagatgccaatttagataaagttcttagtgcatataacaaacatagagacaaaccaatacgtgaacaagcagaaaatattattcatttatttacgttgacgaatcttggagctcccgctgcttttaaatattttgatacaacaattgatcgtaaacgatatacgtctacaaaagaagttttagatgccactcttatccatcaatccatcactggtctttatgaaacacgcattgatttgagtcagctaggaggtgactga

SEQ ID NO: 2004 - protein, 1367 aa, Streptococcus pyogenes
MDKKYSIGLDIGTNSVGWAVITDDYKVPSKKFKVLGNTDRHSIKKNLIGALLFGSGETAEATRLKRTARRRYTRRKNRICYLQEIFSNEMAKVDDSFFHRLEESFLVEEDKKHERHPIFGNIVDEVAYHEKYPTIYHLRKKLADSTDKADLRLIYLALAHMIKFRGHFLIEGDLNPDNSDVDKLFIQLVQIYNQLFEENPINASRVDAKAILSARLSKSRRLENLIAQLPGEKRNGLFGNLIALSLGLTPNFKSNFDLAEDAKLQLSKDTYDDDLDNLLAQIGDQYADLFLAAKNLSDAILLSDILRVNSEITKAPLSASMIKRYDEHHQDLTLLKALVRQQLPEKYKEIFFDQSKNGYAGYIDGGASQEEFYKFIKPILEKMDGTEELLVKLNREDLLRKQRTFDNGSIPHQIHLGELHAILRRQEDFYPFLKDNREKIEKILTFRIPYYVGPLARGNSRFAWMTRKSEETITPWNFEEVVDKGASAQSFIERMTNFDKNLPNEKVLPKHSLLYEYFTVYNELTKVKYVTEGMRKPAFLSGEQKKAIVDLLFKTNRKVTVKQLKEDYFKKIECFDSVEISGVEDRFNASLGAYHDLLKIIKDKDFLDNEENEDILEDIVLTLTLFEDRGMIEERLKTYAHLFDDKVMKQLKRRRYTGWGRLSRKLINGIRDKQSGKTILDFLKSDGFANRNFMQLIHDDSLTFKEDIQKAQVSGQGHSLHEQIANLAGSPAIKKGILQTVKIVDELVKVMGHKPENIVIEMARENQTTQKGQKNSRERMKRIEEGIKELGSQILKEHPVENTQLQNEKLYLYYLQNGRDMYVDQELDINRLSDYDVDHIVPQSFIKDDSIDNKVLTRSDKNRGKSDNVPSEEVVKKMKNYWRQLLNAKLITQRKFDNLTKAERGGLSELDKAGFIKRQLVETRQITKHVAQILDSRMNTKYDENDKLIREVKVITLKSKLVSDFRKDFQFYKVREINNYHHAHDAYLNAVVGTALIKKYPKLESEFVYGDYKVYDVRKMIAKSEQEIGKATAKYFFYSNIMNFFKTEITLANGEIRKRPLIETNGETGEIVWDKGRDFATVRKVLSMPQVNIVKKTEVQTGGFSKESILPKRNSDKLIARKKDWDPKKYGGFDSPTVAYSVLVVAKVEKGKSKKLKSVKELLGITIMERSSFEKNPIDFLEAKGYKEVKKDLIIKLPKYSLFELENGRKRMLASAGELQKGNELALPSKYVNFLYLASHYEKLKGSPEDNEQKQLFVEQHKHYLDEIIEQISEFSKRVILADANLDKVLSAYNKHRDKPIREQAENIIHLFTLTNLGAPAAFKYFDTTIDRKRYTSTKEVLDATLIHQSITGLYETRIDLSQLGGD

SEQ ID NO: 2005 - DNA, 4212 bp, Streptococcus pyogenes
atggataaaaagtattctattggtttagacatcggcactaattccgttggatgggctgtcataaccgatgaatacaaagtaccttcaaagaaatttaaggtgttggggaacacagaccgtcattcgattaaaaagaatcttatcggtgccctcctattcgatagtggcgaaacggcagaggcgactcgcctgaaacgaaccgctcggagaaggtatacacgtcgcaagaaccgaatatgttacttacaagaaatttttagcaatgagatggccaaagttgacgattctttctttcaccgtttggaagagtccttccttgtcgaagaggacaagaaacatgaacggcaccccatctttggaaacatagtagatgaggtggcatatcatgaaaagtacccaacgatttatcacctcagaaaaaagctagttgactcaactgataaagcggacctgaggttaatctacttggctcttgcccatatgataaagttccgtgggcactttctcattgagggtgatctaaatccggacaactcggatgtcgacaaactgttcatccagttagtacaaacctataatcagttgtttgaagagaaccctataaatgcaagtggcgtggatgcgaaggctattcttagcgcccgcctctctaaatcccgacggctagaaaacctgatcgcacaattacccggagagaagaaaaatgggttgttcggtaaccttatagcgctctcactaggcctgacaccaaattttaagtcgaacttcgacttagctgaagatgccaaattgcagcttagtaaggacacgtacgatgacgatctcgacaatctactggcacaaattggagatcagtatgcggacttatttttggctgccaaaaaccttagcgatgcaatcctcctatctgacatactgagagttaatactgagattaccaaggcgccgttatccgcttcaatgatcaaaaggtacgatgaacatcaccaagacttgacacttctcaaggccctagtccgtcagcaactgcctgagaaatataaggaaatattctttgatcagtcgaaaaacgggtacgcaggttatattgacggcggagcgagtcaagaggaattctacaagtttatcaaacccatattagagaagatggatgggacggaagagttgcttgtaaaactcaatcgcgaagatctactgcgaaagcagcggactttcgacaacggtagcattccacatcaaatccacttaggcgaattgcatgctatacttagaaggcaggaggatttttatccgttcctcaaagacaatcgtgaaaagattgagaaaatcctaacctttcgcataccttactatgtgggacccctggcccgagggaactctcggttcgcatggatgacaagaaagtccgaagaaacgattactccatggaattttgaggaagttgtcgataaaggtgcgtcagctcaatcgttcatcgagaggatgaccaactttgacaagaatttaccgaacgaaaaagtattgcctaagcacagtttactttacgagtatttcacagtgtacaatgaactcacgaaagttaagtatgtcactgagggcatgcgtaaacccgcctttctaagcggagaacagaagaaagcaatagtagatctgttattcaagaccaaccgcaaagtgacagttaagcaattgaaagaggactactttaagaaaattgaatgcttcgattctgtcgagatctccggggtagaagatcgatttaatgcgtcacttggtacgtatcatgacctcctaaagataattaaagataaggacttcctggataacgaagagaatgaagatatcttagaagatatagtgttgactcttaccctctttgaagatcgggaaatgattgaggaaagactaaaaacatacgctcacctgttcgacgataaggttatgaaacagttaaagaggcgtcgctatacgggctggggacgattgtcgcggaaacttatcaacgggataagagacaagcaaagtggtaaaactattctcgattttctaaagagcgacggcttcgccaataggaactttatgcagctgatccatgatgactctttaaccttcaaagaggatatacaaaaggcacaggtttccggacaaggggactcattgcacgaacatattgcgaatcttgctggttcgccagccatcaaaaagggcatactccagacagtcaaagtagtggatgagctagttaaggtcatgggacgtcacaaaccggaaaacattgtaatcgagatggcacgcgaaaatcaaacgactcagaaggggcaaaaaaacagtcgagagcggatgaagagaatagaagagggtattaaagaactgggcagccagatcttaaaggagcatcctgtggaaaatacccaattgcagaacgagaaactttacctctattacctacaaaatggaagggacatgtatgttgatcaggaactggacataaaccgtttatctgattacgacgtcgatcacattgtaccccaatcctttttgaaggacgattcaatcgacaataaagtgcttacacgctcggataagaaccgagggaaaagtgacaatgttccaagcgaggaagtcgtaaagaaaatgaagaactattggcggcagctcctaaatgcgaaactgataacgcaaagaaagttcgataacttaactaaagctgagaggggtggcttgtctgaacttgacaaggccggatttattaaacgtcagctcgtggaaacccgccaaatcacaaagcatgttgcacagatactagattcccgaatgaatacgaaatacgacgagaacgataagctgattcgggaagtcaaagtaatcactttaaagtcaaaattggtgtcggacttcagaaaggattttcaattctataaagttagggagataaataactaccaccatgcgcacgacgcttatcttaatgccgtcgtagggaccgcactcattaagaaatacccgaagctagaaagtgagtttgtgtatggtgattacaaagtttatgacgtccgtaagatgatcgcgaaaagcgaacaggagataggcaaggctacagccaaatacttcttttattctaacattatgaatttctttaagacggaaatcactctggcaaacggagagatacgcaaacgacctttaattgaaaccaatggggagacaggtgaaatcgtatgggataagggccgggacttcgcgacggtgagaaaagttttgtccatgccccaagtcaacatagtaaagaaaactgaggtgcagaccggagggttttcaaaggaatcgattcttccaaaaaggaatagtgataagctcatcgctcgtaaaaaggactgggacccgaaaaagtacggtggcttcgatagccctacagttgcctattctgtcctagtagtggcaaaagttgagaagggaaaatccaagaaactgaagtcagtcaaagaattattggggataacgattatggagcgctcgtcttttgaaaagaaccccatcgacttccttgaggcgaaaggttacaaggaagtaaaaaaggatctcataattaaactaccaaagtatagtctgtttgagttagaaaatggccgaaaacggatgttggctagcgccggagagcttcaaaaggggaacgaactcgcactaccgtctaaatacgtgaatttcctgtatttagcgtcccattacgagaagttgaaaggttcacctgaagataacgaacagaagcaactttttgttgagcagcacaaacattatctcgacgaaatcatagagcaaatttcggaattcagtaagagagtcatcctagctgatgccaatctggacaaagtattaagcgcatacaacaagcacagggataaacccatacgtgagcaggcggaaaatattatccatttgtttactcttaccaacctcggcgctccagccgcattcaagtattttgacacaacgatagatcgcaaacgatacacttctaccaaggaggtgctagacgcgacactgattcaccaatccatcacgggattatatgaaactcggatagatttgtcacagcttgggggtgacggatcccccaagaagaagaggaaagtctcgagcgactacaaagaccatgacggtgattataaagatcatgacatcgattacaaggatgacgatgacaaggctgcagga

SEQ ID NO: 2006 - protein, 1368 aa, Streptococcus pyogenes; identical to SEQ ID NO: 3

SEQ ID NO: 2007 - protein, 1307 aa, Acidaminoccous species
TQFEGFTNLYQVSKTLRFELIPQGKTLKHIQEQGFIEEDKARNDHYKELKPIIDRIYKTYADQCLQLVQLDWENLSAAIDSYRKEKTEETRNALIEEQATYRNAIHDYFIGRTDNLTDAINKRHAEIYKGLFKAELFNGKVLKQLGTVTTTEHENALLRSFDKFTTYFSGFYENRKNVFSAEDISTAIPHRIVQDNFPKFKENCHIFTRLITAVPSLREHFENVKKAIGIFVSTSIEEVFSFPFYNQLLTQTQIDLYNQLLGGISREAGTEKIKGLNEVLNLAIQKNDETAHIIASLPHRFIPLFKQILSDRNTLSFILEEFKSDEEVIQSFCKYKTLLRNENVLETAEALFNELNSIDLTHIFISHKKLETISSALCDHWDTLRNALYERRISELTGKITKSAKEKVQRSLKHEDINLQEIISAAGKELSEAFKQKTSEILSHAHAALDQPLPTTMLKKQEEKEILKSQLDSLLGLYHLLDWFAVDESNEVDPEFSARLTGIKLEMEPSLSFYNKARNYATKKPYSVEKFKLNFQMPTLASGWDVNKEKNNGAILFVKNGLYYLGIMPKQKGRYKALSFEPTEKTSEGFDKMYYDYFPDAAKMIPKCSTQLKAVTAHFQTHTTPILLSNNFIEPLEITKEIYDLNNPEKEPKKFQTAYAKKTGDQKGYREALCKWIDFTRDFLSKYTKTTSIDLSSLRPSSQYKDLGEYYAELNPLLYHISFQRIAEKEIMDAVETGKLYLFQIYNKDFAKGHHGKPNLHTLYWTGLFSPENLAKTSIKLNGQAELFYRPKSRMKRMAHRLGEKMLNKKLKDQKTPIPDTLYQELYDYVNHRLSHDLSDEARALLPNVITKEVSHEIIKDRRFTSDKFFFHVPITLNYQAANSPSKFNQRVNAYLKEHPETPIIGIDRGERNLIYITVIDSTGKILEQRSLNTIQQFDYQKKLDNREKERVAARQAWSVVGTIKDLKQGYLSQVIHEIVDLMIHYQAVVVLENLNFGFKSKRTGIAEKAVYQQFEKMLIDKLNCLVLKDYPAEKVGGVLNPYQLTDQFTSFAKMGTQSGFLFYVPAPYTSKIDPLTGFVDPFVWKTIKNHESRKHFLEGFDFLHYDVKTGDFILHFKMNRNLSFQRGLPGFMPAWDIVFEKNETQFDAKGTPFIAGKRIVPVIENHRFTGRYRDLYPANELIALLEEKGIVFRDGSNILPKLLENDDSHAIDTMVALIRSVLQMRNSNAATGEDYINSPVRDLNGVCFDSRFQNPEWPMDADANGAYHIALKGQLLLNHLKESKDLKLQNGISNQDWLAYIQELRN

SEQ ID NO: 2008 - protein, 1307 aa, Acidaminoccous species
TQFEGFTNLYQVSKTLRFELIPQGKTLKHIQEQGFIEEDKARNDHYKELKPIIDRIYKTYADQCLQLVQLDWENLSAAIDSYRKEKTEETRNALIEEQATYRNAIHDYFIGRTDNLTDAINKRHAEIYKGLFKAELFNGKVLKQLGTVTTTEHENALLRSFDKFTTYFSGFYENRKNVFSAEDISTAIPHRIVQDNFPKFKENCHIFTRLITAVPSLREHFENVKKAIGIFVSTSIEEVFSFPFYNQLLTQTQIDLYNQLLGGISREAGTEKIKGLNEVLNLAIQKNDETAHIIASLPHRFIPLFKQILSDRNTLSFILEEFKSDEEVIQSFCKYKTLLRNENVLETAEALFNELNSIDLTHIFISHKKLETISSALCDHWDTLRNALYERRISELTGKITKSAKEKVQRSLKHEDINLQEIISAAGKELSEAFKQKTSEILSHAHAALDQPLPTTMLKKQEEKEILKSQLDSLLGLYHLLDWFAVDESNEVDPEFSARLTGIKLEMEPSLSFYNKARNYATKKPYSVEKFKLNFQMPTLASGWDVNKEKNNGAILFVKNGLYYLGIMPKQKGRYKALSFEPTEKTSEGFDKMYYDYFPDAAKMIPKCSTQLKAVTAHFQTHTTPILLSNNFIEPLEITKEIYDLNNPEKEPKKFQTAYAKKTGDQKGYREALCKWIDFTRDFLSKYTKTTSIDLSSLRPSSQYKDLGEYYAELNPLLYHISFQRIAEKEIMDAVETGKLYLFQIYNKDFAKGHHGKPNLHTLYWTGLFSPENLAKTSIKLNGQAELFYRPKSRMKRMAHRLGEKMLNKKLKDQKTPIPDTLYQELYDYVNHRLSHDLSDEARALLPNVITKEVSHEIIKDRRFTSDKFFFHVPITLNYQAANSPSKFNQRVNAYLKEHPETPIIGIDRGEANLIYITVIDSTGKILEQRSLNTIQQFDYQKKLDNREKERVAARQAWSVVGTIKDLKQGYLSQVIHEIVDLMIHYQAVVVLENLNFGFKSKRTGIAEKAVYQQFEKMLIDKLNCLVLKDYPAEKVGGVLNPYQLTDQFTSFAKMGTQSGFLFYVPAPYTSKIDPLTGFVDPFVWKTIKNHESRKHFLEGFDFLHYDVKTGDFILHFKMNRNLSFQRGLPGFMPAWDIVFEKNETQFDAKGTPFIAGKRIVPVIENHRFTGRYRDLYPANELIALLEEKGIVFRDGSNILPKLLENDDSHAIDTMVALIRSVLQMRNSNAATGEDYINSPVRDLNGVCFDSRFQNPEWPMDADANGAYHIALKGQLLLNHLKESKDLKLQNGISNQDWLAYIQELRN

SEQ ID NO: 2009 - protein, 1228 aa, Lachnospiraceae species
MSKLEKFTNCYSLSKTLRFKAIPVGKTQENIDNKRLLVEDEKRAEDYKGVKKLLDRYYLSFINDVLHSIKLKNLNNYISLFRKKTRTEKENKELENLEINLRKEIAKAFKGNEGYKSLFKKDIIETILPEFLDDKDEIALVNSFNGFTTAFTGFFDNRENMFSEEAKSTSIAFRCINENLTRYISNMDIFEKVDAIFDKHEVQEIKEKILNSDYDVEDFFEGEFFNFVLTQEGIDVYNAIIGGFVTESGEKIKGLNEYINLYNQKTKQKLPKFKPLYKQVLSDRESLSFYGEGYTSDEEVLEVFRNTLNKNSEIFSSIKKLEKLFKNFDEYSSAGIFVKNGPAISTISKDIFGEWNVIRDKWNAEYDDIHLKKKAVVTEKYEDDRRKSFKKIGSFSLEQLQEYADADLSVVEKLKEIIIQKVDEIYKVYGSSEKLFDADFVLEKSLKKNDAVVAIMKDLLDSVKSFENYIKAFFGEGKETNRDESFYGDFVLAYDILLKVDHIYDAIRNYVTQKPYSKDKFKLYFQNPQFMGGWDKDKETDYRATILRYGSKYYLAIMDKKYAKCLQKIDKDDVNGNYEKINYKLLPGPNKMLPKVFFSKKWMAYYNPSEDIQKIYKNGTFKKGDMFNLNDCHKLIDFFKDSISRYPKWSNAYDFNFSETEKYKDIAGFYREVEEQGYKVSFESASKKEVDKLVEEGKLYMFQIYNKDFSDKSHGTPNLHTMYFKLLFDENNHGQIRLSGGAELFMRRASLKKEELVVHPANSPIANKNPDNPKKTTTLSYDVYKDKRFSEDQYELHIPIAINKCPKNIFKINTEVRVLLKHDDNPYVIGIDRGERNLLYIVVVDGKGNIVEQYSLNEIINNFNGIRIKTDYHSLLDKKEKERFEARQNWTSIENIKELKAGYISQVVHKICELVEKYDAVIALEDLNSGFKNSRVKVEKQVYQKFEKMLIDKLNYMVDKKSNPCATGGALKGYQITNKFESFKSMSTQNGFIFYIPAWLTSKIDPSTGFVNLLKTKYTSIADSKKFISSFDRIMYVPEEDLFEFALDYKNFSRTDADYIKKWKLYSYGNRIRIFRNPKKNNVFDWEEVCLTSAYKELFNKYGINYQQGDIRALLCEQSDKAFYSSFMALMSLMLQMRNSITGRTDVDFLISPVKNSDGIFYDSRNYEAQENAILPKNADANGAYNIARKVLWAIGQFKKAEDEKLDKVKIAISNKEWLEYAQTSVKH

SEQ ID NO: 2010 - protein, 1228 aa, Lachnospiraceae species
MSKLEKFTNCYSLSKTLRFKAIPVGKTQENIDNKRLLVEDEKRAEDYKGVKKLLDRYYLSFINDVLHSIKLKNLNNYISLFRKKTRTEKENKELENLEINLRKEIAKAFKGNEGYKSLFKKDIIETILPEFLDDKDEIALVNSFNGFTTAFTGFFDNRENMFSEEAKSTSIAFRCINENLTRYISNMDIFEKVDAIFDKHEVQEIKEKILNSDYDVEDFFEGEFFNFVLTQEGIDVYNAIIGGFVTESGEKIKGLNEYINLYNQKTKQKLPKFKPLYKQVLSDRESLSFYGEGYTSDEEVLEVFRNTLNKNSEIFSSIKKLEKLFKNFDEYSSAGIFVKNGPAISTISKDIFGEWNVIRDKWNAEYDDIHLKKKAVVTEKYEDDRRKSFKKIGSFSLEQLQEYADADLSVVEKLKEIIIQKVDEIYKVYGSSEKLFDADFVLEKSLKKNDAVVAIMKDLLDSVKSFENYIKAFFGEGKETNRDESFYGDFVLAYDILLKVDHIYDAIRNYVTQKPYSKDKFKLYFQNPQFMGGWDKDKETDYRATILRYGSKYYLAIMDKKYAKCLQKIDKDDVNGNYEKINYKLLPGPNKMLPKVFFSKKWMAYYNPSEDIQKIYKNGTFKKGDMFNLNDCHKLIDFFKDSISRYPKWSNAYDFNFSETEKYKDIAGFYREVEEQGYKVSFESASKKEVDKLVEEGKLYMFQIYNKDFSDKSHGTPNLHTMYFKLLFDENNHGQIRLSGGAELFMRRASLKKEELVVHPANSPIANKNPDNPKKTTTLSYDVYKDKRFSEDQYELHIPIAINKCPKNIFKINTEVRVLLKHDDNPYVIGIDRGEANLLYIVVVDGKGNIVEQYSLNEIINNFNGIRIKTDYHSLLDKKEKERFEARQNWTSIENIKELKAGYISQVVHKICELVEKYDAVIALEDLNSGFKNSRVKVEKQVYQKFEKMLIDKLNYMVDKKSNPCATGGALKGYQITNKFESFKSMSTQNGFIFYIPAWLTSKIDPSTGFVNLLKTKYTSIADSKKFISSFDRIMYVPEEDLFEFALDYKNFSRTDADYIKKWKLYSYGNRIRIFRNPKKNNVFDWEEVCLTSAYKELFNKYGINYQQGDIRALLCEQSDKAFYSSFMALMSLMLQMRNSITGRTDVDFLISPVKNSDGIFYDSRNYEAQENAILPKNADANGAYNIARKVLWAIGQFKKAEDEKLDKVKIAISNKEWLEYAQTSVKH

SEQ ID NO: 2011 - protein, 1228 aa, Lachnospiraceae species
MSKLEKFTNCYSLSKTLRFKAIPVGKTQENIDNKRLLVEDEKRAEDYKGVKKLLDRYYLSFINDVLHSIKLKNLNNYISLFRKKTRTEKENKELENLEINLRKEIAKAFKGNEGYKSLFKKDIIETILPEFLDDKDEIALVNSFNGFTTAFTGFFDNRENMFSEEAKSTSIAFRCINENLTRYISNMDIFEKVDAIFDKHEVQEIKEKILNSDYDVEDFFEGEFFNFVLTQEGIDVYNAIIGGFVTESGEKIKGLNEYINLYNQKTKQKLPKFKPLYKQVLSDRESLSFYGEGYTSDEEVLEVFRNTLNKNSEIFSSIKKLEKLFKNFDEYSSAGIFVKNGPAISTISKDIFGEWNVIRDKWNAEYDDIHLKKKAVVTEKYEDDRRKSFKKIGSFSLEQLQEYADADLSVVEKLKEIIIQKVDEIYKVYGSSEKLFDADFVLEKSLKKNDAVVAIMKDLLDSVKSFENYIKAFFGEGKETNRDESFYGDFVLAYDILLKVDHIYDAIRNYVTQKPYSKDKFKLYFQNPQFMGGWDKDKETDYRATILRYGSKYYLAIMDKKYAKCLQKIDKDDVNGNYEKINYKLLPGPNKMLPKVFFSKKWMAYYNPSEDIQKIYKNGTFKKGDMFNLNDCHKLIDFFKDSISRYPKWSNAYDFNFSETEKYKDIAGFYREVEEQGYKVSFESASKKEVDKLVEEGKLYMFQIYNKDFSDKSHGTPNLHTMYFKLLFDENNHGQIRLSGGAELFMRRASLKKEELVVHPANSPIANKNPDNPKKTTTLSYDVYKDKRFSEDQYELHIPIAINKCPKNIFKINTEVRVLLKHDDNPYVIGIDRGERNLLYIVVVDGKGNIVEQYSLNEIINNFNGIRIKTDYHSLLDKKEKERFEARQNWTSIENIKELKAGYISQVVHKICELVEKYDAVIALEDLNSGFKNSRVKVEKQVYQKFEKMLIDKLNYMVDKKSNPCATGGALKGYQITNKFESFKSMSTQNGFIFYIPAWLTSKIDPSTGFVNLLKTKYTSIADSKKFISSFDRIMYVPEEDLFEFALDYKNFSRTDADYIKKWKLYSYGNRIRIFRNPKKNNVFDWEEVCLTSAYKELFNKYGINYQQGDIRALLCEQSDKAFYSSFMALMSLMLQMANSITGRTDVDFLISPVKNSDGIFYDSRNYEAQENAILPKNADANGAYNIARKVLWAIGQFKKAEDEKLDKVKIAISNKEWLEYAQTSVKH

SEQ ID NO: 2012 - protein, 1305 aa, Acidaminoccous species
TQFEGFTNLYQVSKTLRFELIPQGKTLKHIQEQGFIEEDKARNDHYKELKPIIDRIYKTYADQCLQLVQLDWENLSAAIDSYRKEKTEETRNALIEEQATYRNAIHDYFIGRTDNLTDAINKRHAEIYKGLFKAELFNGKVLKQLGTVTTTEHENALLRSFDKFTTYFSGFYENRKNVFSAEDISTAIPHRIVQDNFPKFKENCHIFTRLITAVPSLREHFENVKKAIGIFVSTSIEEVFSFPFYNQLLTQTQIDLYNQLLGGISREAGTEKIKGLNEVLNLAIQKNDETAHIIASLPHRFIPLFKQILSDRNTLSFILEEFKSDEEVIQSFCKYKTLLRNENVLETAEALFNELNSIDLTHIFISHKKLETISSALCDHWDTLRNALYERRISELTGKITKSAKEKVQRSLKHEDINLQEIISAAGKELSEAFKQKTSEILSHAHAALDQPLPTTMLKKQEEKEILKSQLDSLLGLYHLLDWFAVDESNEVDPEFSARLTGIKLEMEPSLSFYNKARNYATKKPYSVEKFKLNFQMPTLASGWDVNKEKNNGAILFVKNGLYYLGIMPKQKGRYKALSFEPTEKTSEGFDKMYYDYFPDAAKMIPKCSTQLKAVTAHFQTHTTPILLSNNFIEPLEITKEIYDLNNPEKEPKKFQTAYAKKGQKGYREALCKWIDFTRDFLSKYTKTTSIDLSSLRPSSQYKDLGEYYAELNPLLYHISFQRIAEKEIMDAVETGKLYLFQIYNKDFAKGHHGKPNLHTLYWTGLFSPENLAKTSIKLNGQAELFYRPKSRMKRMAHRLGEKMLNKKLKDQKTPIPDTLYQELYDYVNHRLSHDLSDEARALLPNVITKEVSHEIIKDRRFTSDKFFFHVPITLNYQAANSPSKFNQRVNAYLKEHPETPIIGIDRGERNLIYITVIDSTGKILEQRSLNTIQQFDYQKKLDNREKERVAARQAWSVVGTIKDLKQGYLSQVIHEIVDLMIHYQAVVVLENLNFGFKSKRTGIAEKAVYQQFEKMLIDKLNCLVLKDYPAEKVGGVLNPYQLTDQFTSFAKMGTQSGFLFYVPAPYTSKIDPLTGFVDPFVWKTIKNHESRKHFLEGFDFLHYDVKTGDFILHFKMNRNLSFQRGLPGFMPAWDIVFEKNETQFDAKGTPFIAGKRIVPVIENHRFTGRYRDLYPANELIALLEEKGIVFRDGSNILPKLLENDDSHAIDTMVALIRSVLQMRNSNAATGEDYINSPVRDLNGVCFDSRFQNPEWPMDADANGAYHIALKGQLLLNHLKESKDLKLQNGISNQDWLAYIQELRN

SEQ ID NO: 2013 - protein, 1303 aa, Acidaminoccous species
TQFEGFTNLYQVSKTLRFELIPQGKTLKHIQEQGFIEEDKARNDHYKELKPIIDRIYKTYADQCLQLVQLDWENLSAAIDSYRKEKTEETRNALIEEQATYRNAIHDYFIGRTDNLTDAINKRHAEIYKGLFKAELFNGKVLKQLGTVTTTEHENALLRSFDKFTTYFSGFYENRKNVFSAEDISTAIPHRIVQDNFPKFKENCHIFTRLITAVPSLREHFENVKKAIGIFVSTSIEEVFSFPFYNQLLTQTQIDLYNQLLGGISREAGTEKIKGLNEVLNLAIQKNDETAHIIASLPHRFIPLFKQILSDRNTLSFILEEFKSDEEVIQSFCKYKTLLRNENVLETAEALFNELNSIDLTHIFISHKKLETISSALCDHWDTLRNALYERRISELTGKITKSAKEKVQRSLKHEDINLQEIISAAGKELSEAFKQKTSEILSHAHAALDQPLPTTMLKKQEEKEILKSQLDSLLGLYHLLDWFAVDESNEVDPEFSARLTGIKLEMEPSLSFYNKARNYATKKPYSVEKFKLNFQMPTLASGWDVNKEKNNGAILFVKNGLYYLGIMPKQKGRYKALSFEPTEKTSEGFDKMYYDYFPDAAKMIPKCSTQLKAVTAHFQTHTTPILLSNNFIEPLEITKEIYDLNNPEKEPKKFQTAYAKGKGYREALCKWIDFTRDFLSKYTKTTSIDLSSLRPSSQYKDLGEYYAELNPLLYHISFQRIAEKEIMDAVETGKLYLFQIYNKDFAKGHHGKPNLHTLYWTGLFSPENLAKTSIKLNGQAELFYRPKSRMKRMAHRLGEKMLNKKLKDQKTPIPDTLYQELYDYVNHRLSHDLSDEARALLPNVITKEVSHEIIKDRRFTSDKFFFHVPITLNYQAANSPSKFNQRVNAYLKEHPETPIIGIDRGERNLIYITVIDSTGKILEQRSLNTIQQFDYQKKLDNREKERVAARQAWSVVGTIKDLKQGYLSQVIHEIVDLMIHYQAVVVLENLNFGFKSKRTGIAEKAVYQQFEKMLIDKLNCLVLKDYPAEKVGGVLNPYQLTDQFTSFAKMGTQSGFLFYVPAPYTSKIDPLTGFVDPFVWKTIKNHESRKHFLEGFDFLHYDVKTGDFILHFKMNRNLSFQRGLPGFMPAWDIVFEKNETQFDAKGTPFIAGKRIVPVIENHRFTGRYRDLYPANELIALLEEKGIVFRDGSNILPKLLENDDSHAIDTMVALIRSVLQMRNSNAATGEDYINSPVRDLNGVCFDSRFQNPEWPMDADANGAYHIALKGQLLLNHLKESKDLKLQNGISNQDWLAYIQELRN

SEQ ID NO: 2014 - protein, 1301 aa, Acidaminoccous species
TQFEGFTNLYQVSKTLRFELIPQGKTLKHIQEQGFIEEDKARNDHYKELKPIIDRIYKTYADQCLQLVQLDWENLSAAIDSYRKEKTEETRNALIEEQATYRNAIHDYFIGRTDNLTDAINKRHAEIYKGLFKAELFNGKVLKQLGTVTTTEHENALLRSFDKFTTYFSGFYENRKNVFSAEDISTAIPHRIVQDNFPKFKENCHIFTRLITAVPSLREHFENVKKAIGIFVSTSIEEVFSFPFYNQLLTQTQIDLYNQLLGGISREAGTEKIKGLNEVLNLAIQKNDETAHIIASLPHRFIPLFKQILSDRNTLSFILEEFKSDEEVIQSFCKYKTLLRNENVLETAEALFNELNSIDLTHIFISHKKLETISSALCDHWDTLRNALYERRISELTGKITKSAKEKVQRSLKHEDINLQEIISAAGKELSEAFKQKTSEILSHAHAALDQPLPTTMLKKQEEKEILKSQLDSLLGLYHLLDWFAVDESNEVDPEFSARLTGIKLEMEPSLSFYNKARNYATKKPYSVEKFKLNFQMPTLASGWDVNKEKNNGAILFVKNGLYYLGIMPKQKGRYKALSFEPTEKTSEGFDKMYYDYFPDAAKMIPKCSTQLKAVTAHFQTHTTPILLSNNFIEPLEITKEIYDLNNPEKEPKKFQTAYAGGYREALCKWIDFTRDFLSKYTKTTSIDLSSLRPSSQYKDLGEYYAELNPLLYHISFQRIAEKEIMDAVETGKLYLFQIYNKDFAKGHHGKPNLHTLYWTGLFSPENLAKTSIKLNGQAELFYRPKSRMKRMAHRLGEKMLNKKLKDQKTPIPDTLYQELYDYVNHRLSHDLSDEARALLPNVITKEVSHEIIKDRRFTSDKFFFHVPITLNYQAANSPSKFNQRVNAYLKEHPETPIIGIDRGERNLIYITVIDSTGKILEQRSLNTIQQFDYQKKLDNREKERVAARQAWSVVGTIKDLKQGYLSQVIHEIVDLMIHYQAVVVLENLNFGFKSKRTGIAEKAVYQQFEKMLIDKLNCLVLKDYPAEKVGGVLNPYQLTDQFTSFAKMGTQSGFLFYVPAPYTSKIDPLTGFVDPFVWKTIKNHESRKHFLEGFDFLHYDVKTGDFILHFKMNRNLSFQRGLPGFMPAWDIVFEKNETQFDAKGTPFIAGKRIVPVIENHRFTGRYRDLYPANELIALLEEKGIVFRDGSNILPKLLENDDSHAIDTMVALIRSVLQMRNSNAATGEDYINSPVRDLNGVCFDSRFQNPEWPMDADANGAYHIALKGQLLLNHLKESKDLKLQNGISNQDWLAYIQELRN

SEQ ID NO: 2015 - protein, 1129 aa, Alicyclobacillus acidoterrestris
MAVKSIKVKLRLDDMPEIRAGLWKLHKEVNAGVRYYTEWLSLLRQENLYRRSPNGDGEQECDKTAEECKAELLERLRARQVENGHRGPAGSDDELLQLARQLYELLVPQAIGAKGDAQQIARKFLSPLADKDAVGGLGIAKAGNKPRWVRMREAGEPGWEEEKEKAETRKSADRTADVLRALADFGLKPLMRVYTDSEMSSVEWKPLRKGQAVRTWDRDMFQQAIERMMSWESWNQRVGQEYAKLVEQKNRFEQKNFVGQEHLVHLVNQLQQDMKEASPGLESKEQTAHYVTGRALRGSDKVFEKWGKLAPDAPFDLYDAEIKNVQRRNTRRFGSHDLFAKLAEPEYQALWREDASFLTRYAVYNSILRKLNHAKMFATFTLPDATAHPIWTRFDKLGGNLHQYTFLFNEFGERRHAIRFHKLLKVENGVAREVDDVTVPISMSEQLDNLLPRDPNEPIALYFRDYGAEQHFTGEFGGAKIQCRRDQLAHMHRRRGARDVYLNVSVRVQSQSEARGERRPPYAAVFRLVGDNHRAFVHFDKLSDYLAEHPDDGKLGSEGLLSGLRVMSVDLGLRTSASISVFRVARKDELKPNSKGRVPFFFPIKGNDNLVAVHERSQLLKLPGETESKDLRAIREERQRTLRQLRTQLAYLRLLVRCGSEDVGRRERSWAKLIEQPVDAANHMTPDWREAFENELQKLKSLHGICSDKEWMDAVYESVRRVWRHMGKQVRDWRKDVRSGERPKIRGYAKDVVGGNSIEQIEYLERQYKFLKSWSFFGKVSGQVIRAEKGSRFAITLREHIDHAKEDRLKKLADRIIMEALGYVYALDERGKGKWVAKYPPCQLILLEELSEYQFNNDRPPSENNQLMQWSHRGVFQELINQAQVHDLLVGTMYAAFSSRFDARTGAPGIRCRRVPARCTQEHNPEPFPWWLNKFVVEHTLDACPLRADDLIPTGEGEIFVSPFSAEEGDFHQIHADLNAAQNLQQRLWSDFDISQIRLRCDWGEVDGELVLIPRLTGKRTADSYSNKVFYTNTGVTYYERERGKKRRKVFAQEKLSEEEAELLVEADEAREKSVVLMRDPSGIINRGNWTRQKEFWSMVNQRIEGYLVKQIRSRVPLQDSACENTGDI

SEQ ID NO: 2016 - protein, 1389 aa, Leptotrichia shahii
MGNLFGHKRWYEVRDKKDFKIKRKVKVKRNYDGNKYILNINENNNKEKIDNNKFIRKYINYKKNDNILKEFTRKFHAGNILFKLKGKEGIIRIENNDDFLETEEVVLYIEAYGKSEKLKALGITKKKIIDEAIRQGITKDDKKIEIKRQENEEEIEIDIRDEYTNKTLNDCSIILRIIENDELETKKSIYEIFKNINMSLYKIIEKIIENETEKVFENRYYEEHLREKLLKDDKIDVILTNFMEIREKIKSNLEILGFVKFYLNVGGDKKKSKNKKMLVEKILNINVDLTVEDIADFVIKELEFWNITKRIEKVKKVNNEFLEKRRNRTYIKSYVLLDKHEKFKIERENKKDKIVKFFVENIKNNSIKEKIEKILAEFKIDELIKKLEKELKKGNCDTEIFGIFKKHYKVNFDSKKFSKKSDEEKELYKIIYRYLKGRIEKILVNEQKVRLKKMEKIEIEKILNESILSEKILKRVKQYTLEHIMYLGKLRHNDIDMTTVNTDDFSRLHAKEELDLELITFFASTNMELNKIFSRENINNDENIDFFGGDREKNYVLDKKILNSKIKIIRDLDFIDNKNNITNNFIRKFTKIGTNERNRILHAISKERDLQGTQDDYNKVINIIQNLKISDEEVSKALNLDVVFKDKKNIITKINDIKISEENNNDIKYLPSFSKVLPEILNLYRNNPKNEPFDTIETEKIVLNALIYVNKELYKKLILEDDLEENESKNIFLQELKKTLGNIDEIDENIIENYYKNAQISASKGNNKAIKKYQKKVIECYIGYLRKNYEELFDFSDFKMNIQEIKKQIKDINDNKTYERITVKTSDKTIVINDDFEYIISIFALLNSNAVINKIRNRFFATSVWLNTSEYQNIIDILDEIMQLNTLRNECITENWNLNLEEFIQKMKEIEKDFDDFKIQTKKEIFNNYYEDIKNNILTEFKDDINGCDVLEKKLEKIVIFDDETKFEIDKKSNILQDEQRKLSNINKKDLKKKVDQYIKDKDQEIKSKILCRIIFNSDFLKKYKKEIDNLIEDMESENENKFQEIYYPKERKNELYIYKKNLFLNIGNPNFDKIYGLISNDIKMADAKFLFNIDGKNIRKNKISEIDAILKNLNDKLNGYSKEYKEKYIKKLKENDDFFAKNIQNKNYKSFEKDYNRVSEYKKIRDLVEFNYLNKIESYLIDINWKLAIQMARFERDMHYIVNGLRELGIIKLSGYNTGISRAYPKRNGSDGFYTTTAYYKFFDEESYKKFEKICYGFGIDLSENSEINKPENESIRNYISHFYIVRNPFADYSIAEQIDRVSNLLSYSTRYNNSTYASVFEVFKKDVNLDYDELKKKFKLIGNNDILERLMKPKKVSVLELESYNSDYIKNLIIELLTKIENTNDTL

SEQ ID NO: 2017 - protein, 1050 aa, Marine metagenome
MRSNYHGGRNARQWRKQISGLARRTKETVFTYKFPLETDAAEIDFDKAVQTYGIAEGVGHGSLIGLVCAFHLSGFRLFSKAGEAMAFRNRSRYPTDAFAEKLSAIMGIQLPTLSPEGLDLIFQSPPRSRDGIAPVWSENEVRNRLYTNWTGRGPANKPDEHLLEIAGEIAKQVFPKFGGWDDLASDPDKALAAADKYFQSQGDFPSIASLPAAIMLSPANSTVDFEGDYIAIDPAAETLLHQAVSRCAARLGRERPDLDQNKGPFVSSLQDALVSSQNNGLSWLFGVGFQHWKEKSPKELIDEYKVPADQHGAVTQVKSFVDAIPLNPLFDTTHYGEFRASVAGKVRSWVANYWKRLLDLKSLLATTEFTLPESISDPKAVSLFSGLLVDPQGLKKVADSLPARLVSAEEAIDRLMGVGIPTAADIAQVERVADEIGAFIGQVQQFNNQVKQKLENLQDADDEEFLKGLKIELPSGDKEPPAINRISGGAPDAAAEISELEEKLQRLLDARSEHFQTISEWAEENAVTLDPIAAMVELERLRLAERGATGDPEEYALRLLLQRIGRLANRVSPVSAGSIRELLKPVFMEEREFNLFFHNRLGSLYRSPYSTSRHQPFSIDVGKAKAIDWIAGLDQISSDIEKALSGAGEALGDQLRDWINLAGFAISQRLRGLPDTVPNALAQVRCPDDVRIPPLLAMLLEEDDIARDVCLKAFNLYVSAINGCLFGALREGFIVRTRFQRIGTDQIHYVPKDKAWEYPDRLNTAKGPINAAVSSDWIEKDGAVIKPVETVRNLSSTGFAGAGVSEYLVQAPHDWYTPLDLRDVAHLVTGLPVEKNITKLKRLTNRTAFRMVGASSFKTHLDSVLLSDKIKLGDFTIIIDQHYRQSVTYGGKVKISYEPERLQVEAAVPVVDTRDRTVPEPDTLFDHIVAIDLGERSVGFAVFDIKSCLRTGEVKPIHDNNGNPVVGTVAVPSIRRLMKAVRSHRRRRQPNQKVNQTYSTALQNYRENVIGDVCNRIDTLMERYNAFPVLEFQIKNFQAGAKQLEIVYGS

SEQ ID NO: 2018 - protein, 345 aa, Sulfolobus islandicus
MEVPLYNIFGDNYIIQVATEAENSTIYNNKVEIDDEELRNVLNLAYKIAKNNEDAAAERRGKAKKKKGEEGETTTSNIILPLSGNDKNPWTETLKCYNFPTTVALSEVFKNFSQVKECEEVSAPSFVKPEFYEFGRSPGMVERTRRVKLEVEPHYLIIAAAGWVLTRLGKAKVSEGDYVGVNVFTPTRGILYSLIQNVNGIVPGIKPETAFGLWIARKVVSSVTNPNVSVVRIYTISDAVGQNPTTINGGFSIDLTKLLEKRYLLSERLEAIARNALSISSNMRERYIVLANYIYEYLTGSKRLEDLLYFANRDLIMNLNSDDGKVRDLKLISAYVNGELIRGEG

SEQ ID NO: 2019 - protein, 345 aa, Sulfolobus islandicus
MEVPLYNIFGDNYIIQVATEAENSTIYNNKVEIDDEELRNVLNLAYKIAKNNEDAAAERRGKAKKKKGEEGETTTSNIILPLSGNDKNPWTETLKCYNFPTTVALSEVFKNFSQVKECEEVSAPSFVKPEFYKFGRSPGMVERTRRVKLEVEPHYLIMAAAGWVLTRLGKAKVSEGDYVGVNVFTPTRGILYSLIQNVNGIVPGIKPETAFGLWIARKVVSSVTNPNVSVVSIYTISDAVGQNPTTINGGFSIDLTKLLEKRDLLSERLEAIARNALSISSNMRERYIVLANYIYEYLTGSKRLEDLLYFANRDLIMNLNSDDGKVRDLKLISAYVNGELIRGEG

SEQ ID NO: 2020 - protein, 1210 aa, Uncultured Parcubacteria group bacterium
MSKRHPRISGVKGYRLHAQRLEYTGKSGAMRTIKYPLYSSPSGGRTVPREIVSAINDDYVGLYGLSNFDDLYNAEKRNEEKVYSVLDFWYDCVQYGAVFSYTAPGLLKNVAEVRGGSYELTKTLKGSHLYDELQIDKVIKFLNKKEISRANGSLDKLKKDIIDCFKAEYRERHKDQCNKLADDIKNAKKDAGASLGERQKKLFRDFFGISEQSENDKPSFTNPLNLTCCLLPFDTVNNNRNRGEVLFNKLKEYAQKLDKNEGSLEMWEYIGIGNSGTAFSNFLGEGFLGRLRENKITELKKAMMDITDAWRGQEQEEELEKRLRILAALTIKLREPKFDNHWGGYRSDINGKLSSWLQNYINQTVKIKEDLKGHKKDLKKAKEMINRFGESDTKEEAVVSSLLESIEKIVPDDSADDEKPDIPAIAIYRRFLSDGRLTLNRFVQREDVQEALIKERLEAEKKKKPKKRKKKSDAEDEKETIDFKELFPHLAKPLKLVPNFYGDSKRELYKKYKNAAIYTDALWKAVEKIYKSAFSSSLKNSFFDTDFDKDFFIKRLQKIFSVYRRFNTDKWKPIVKNSFAPYCDIVSLAENEVLYKPKQSRSRKSAAIDKNRVRLPSTENIAKAGIALARELSVAGFDWKDLLKKEEHEEYIDLIELHKTALALLLAVTETQLDISALDFVENGTVKDFMKTRDGNLVLEGRFLEMFSQSIVFSELRGLAGLMSRKEFITRSAIQTMNGKQAELLYIPHEFQSAKITTPKEMSRAFLDLAPAEFATSLEPESLSEKSLLKLKQMRYYPHYFGYELTRTGQGIDGGVAENALRLEKSPVKKREIKCKQYKTLGRGQNKIVLYVRSSYYQTQFLEWFLHRPKNVQTDVAVSGSFLIDEKKVKTRWNYDALTVALEPVSGSERVFVSQPFTIFPEKSAEEEGQRYLGIDIGEYGIAYTALEITGDSAKILDQNFISDPQLKTLREEVKGLKLDQRRGTFAMPSTKIARIRESLVHSLRNRIHHLALKHKAKIVYELEVSRFEEGKQKIKKVYATLKKADVYSEIDADKNLQTTVWGKLAVASEISASYTSQFCGACKKLWRAEMQVDETITTQELIGTVRVIKGGTLIDAIKDFMRPPIFDENDTPFPKYRDFCDKHHISKKMRGNSCLFICPFCRANADADIQASQTIALLRYVKEEKKVEDYFERFRKLKNIKVLGQMKKI

SEQ ID NO: 2021 - protein, 1052 aa, Staphylococcus aureus
KRNYILGLDIGITSVGYGIIDYETRDVIDAGVRLFKEANVENNEGRRSKRGARRLKRRRRHRIQRVKKLLFDYNLLTDHSELSGINPYEARVKGLSQKLSEEEFSAALLHLAKRRGVHNVNEVEEDTGNELSTKEQISRNSKALEEKYVAELQLERLKKDGEVRGSINRFKTSDYVKEAKQLLKVQKAYHQLDQSFIDTYIDLLETRRTYYEGPGEGSPFGWKDIKEWYEMLMGHCTYFPEELRSVKYAYNADLYNALNDLNNLVITRDENEKLEYYEKFQIIENVFKQKKKPTLKQIAKEILVNEEDIKGYRVTSTGKPEFTNLKVYHDIKDITARKEIIENAELLDQIAKILTIYQSSEDIQEELTNLNSELTQEEIEQISNLKGYTGTHNLSLKAINLILDELWHTNDNQIAIFNRLKLVPKKVDLSQQKEIPTTLVDDFILSPVVKRSFIQSIKVINAIIKKYGLPNDIIIELAREKNSKDAQKMINEMQKRNRQTNERIEEIIRTTGKENAKYLIEKIKLHDMQEGKCLYSLEAIPLEDLLNNPFNYEVDHIIPRSVSFDNSFNNKVLVKQEENSKKGNRTPFQYLSSSDSKISYETFKKHILNLAKGKGRISKTKKEYLLEERDINRFSVQKDFINRNLVDTRYATRGLMNLLRSYFRVNNLDVKVKSINGGFTSFLRRKWKFKKERNKGYKHHAEDALIIANADFIFKEWKKLDKAKKVMENQMFEEKQAESMPEIETEQEYKEIFITPHQIKHIKDFKDYKYSHRVDKKPNRELINDTLYSTRKDDKGNTLIVNNLNGLYDKDNDKLKKLINKSPEKLLMYHHDPQTYQKLKLIMEQYGDEKNPLYKYYEETGNYLTKYSKKDNGPVIKKIKYYGNKLNAHLDITDDYPNSRNKVVKLSLKPYRFDVYLDNGVYKFVTVKNLDVIKKENYYEVNSKCYEEAKKLKKISNQAEFIASFYNNDLIKINGELYRVIGVNNDLLNRIEVNMIDITYREYLENMNDKRPPRIIKTIASKTQSIKKYSTDILGNLYEVKSKKHPQIIKKG

SEQ ID NO: 2022 - protein, 1052 aa, Staphylococcus aureus
KRNYILGLAIGITSVGYGIIDYETRDVIDAGVRLFKEANVENNEGRRSKRGARRLKRRRRHRIQRVKKLLFDYNLLTDHSELSGINPYEARVKGLSQKLSEEEFSAALLHLAKRRGVHNVNEVEEDTGNELSTKEQISRNSKALEEKYVAELQLERLKKDGEVRGSINRFKTSDYVKEAKQLLKVQKAYHQLDQSFIDTYIDLLETRRTYYEGPGEGSPFGWKDIKEWYEMLMGHCTYFPEELRSVKYAYNADLYNALNDLNNLVITRDENEKLEYYEKFQIIENVFKQKKKPTLKQIAKEILVNEEDIKGYRVTSTGKPEFTNLKVYHDIKDITARKEIIENAELLDQIAKILTIYQSSEDIQEELTNLNSELTQEEIEQISNLKGYTGTHNLSLKAINLILDELWHTNDNQIAIFNRLKLVPKKVDLSQQKEIPTTLVDDFILSPVVKRSFIQSIKVINAIIKKYGLPNDIIIELAREKNSKDAQKMINEMQKRNRQTNERIEEIIRTTGKENAKYLIEKIKLHDMQEGKCLYSLEAIPLEDLLNNPFNYEVDHIIPRSVSFDNSFNNKVLVKQEENSKKGNRTPFQYLSSSDSKISYETFKKHILNLAKGKGRISKTKKEYLLEERDINRFSVQKDFINRNLVDTRYATRGLMNLLRSYFRVNNLDVKVKSINGGFTSFLRRKWKFKKERNKGYKHHAEDALIIANADFIFKEWKKLDKAKKVMENQMFEEKQAESMPEIETEQEYKEIFITPHQIKHIKDFKDYKYSHRVDKKPNRELINDTLYSTRKDDKGNTLIVNNLNGLYDKDNDKLKKLINKSPEKLLMYHHDPQTYQKLKLIMEQYGDEKNPLYKYYEETGNYLTKYSKKDNGPVIKKIKYYGNKLNAHLDITDDYPNSRNKVVKLSLKPYRFDVYLDNGVYKFVTVKNLDVIKKENYYEVNSKCYEEAKKLKKISNQAEFIASFYNNDLIKINGELYRVIGVNNDLLNRIEVNMIDITYREYLENMNDKRPPRIIKTIASKTQSIKKYSTDILGNLYEVKSKKHPQIIKKG

SEQ ID NO: 2023 - protein, 1052 aa, Staphylococcus aureus
KRNYILGLDIGITSVGYGIIDYETRDVIDAGVRLFKEANVENNEGRRSKRGARRLKRRRRHRIQRVKKLLFDYNLLTDHSELSGINPYEARVKGLSQKLSEEEFSAALLHLAKRRGVHNVNEVEEDTGNELSTKEQISRNSKALEEKYVAELQLERLKKDGEVRGSINRFKTSDYVKEAKQLLKVQKAYHQLDQSFIDTYIDLLETRRTYYEGPGEGSPFGWKDIKEWYEMLMGHCTYFPEELRSVKYAYNADLYNALNDLNNLVITRDENEKLEYYEKFQIIENVFKQKKKPTLKQIAKEILVNEEDIKGYRVTSTGKPEFTNLKVYHDIKDITARKEIIENAELLDQIAKILTIYQSSEDIQEELTNLNSELTQEEIEQISNLKGYTGTHNLSLKAINLILDELWHTNDNQIAIFNRLKLVPKKVDLSQQKEIPTTLVDDFILSPVVKRSFIQSIKVINAIIKKYGLPNDIIIELAREKNSKDAQKMINEMQKRNRQTNERIEEIIRTTGKENAKYLIEKIKLHDMQEGKCLYSLEAIPLEDLLNNPFNYEVDHIIPRSVSFDNSFNNKVLVKQEEASKKGNRTPFQYLSSSDSKISYETFKKHILNLAKGKGRISKTKKEYLLEERDINRFSVQKDFINRNLVDTRYATRGLMNLLRSYFRVNNLDVKVKSINGGFTSFLRRKWKFKKERNKGYKHHAEDALIIANADFIFKEWKKLDKAKKVMENQMFEEKQAESMPEIETEQEYKEIFITPHQIKHIKDFKDYKYSHRVDKKPNRELINDTLYSTRKDDKGNTLIVNNLNGLYDKDNDKLKKLINKSPEKLLMYHHDPQTYQKLKLIMEQYGDEKNPLYKYYEETGNYLTKYSKKDNGPVIKKIKYYGNKLNAHLDITDDYPNSRNKVVKLSLKPYRFDVYLDNGVYKFVTVKNLDVIKKENYYEVNSKCYEEAKKLKKISNQAEFIASFYNNDLIKINGELYRVIGVNNDLLNRIEVNMIDITYREYLENMNDKRPPRIIKTIASKTQSIKKYSTDILGNLYEVKSKKHPQIIKKG

SEQ ID NO: 2024 - protein, 1052 aa, Staphylococcus aureus
KRNYILGLDIGITSVGYGIIDYETRDVIDAGVRLFKEANVENNEGRRSKRGARRLKRRRRHRIQRVKKLLFDYNLLTDHSELSGINPYEARVKGLSQKLSEEEFSAALLHLAKRRGVHNVNEVEEDTGNELSTKEQISRNSKALEEKYVAELQLERLKKDGEVRGSINRFKTSDYVKEAKQLLKVQKAYHQLDQSFIDTYIDLLETRRTYYEGPGEGSPFGWKDIKEWYEMLMGHCTYFPEELRSVKYAYNADLYNALNDLNNLVITRDENEKLEYYEKFQIIENVFKQKKKPTLKQIAKEILVNEEDIKGYRVTSTGKPEFTNLKVYHDIKDITARKEIIENAELLDQIAKILTIYQSSEDIQEELTNLNSELTQEEIEQISNLKGYTGTHNLSLKAINLILDELWHTNDNQIAIFNRLKLVPKKVDLSQQKEIPTTLVDDFILSPVVKRSFIQSIKVINAIIKKYGLPNDIIIELAREKNSKDAQKMINEMQKRNRQTNERIEEIIRTTGKENAKYLIEKIKLHDMQEGKCLYSLEAIPLEDLLNNPFNYEVDHIIPRSVSFDNSFNNKVLVKQEEASKKGNRTPFQYLSSSDSKISYETFKKHILNLAKGKGRISKTKKEYLLEERDINRFSVQKDFINRNLVDTRYATRGLMNLLRSYFRVNNLDVKVKSINGGFTSFLRRKWKFKKERNKGYKHHAEDALIIANADFIFKEWKKLDKAKKVMENQMFEEKQAESMPEIETEQEYKEIFITPHQIKHIKDFKDYKYSHRVDKKPNRKLINDTLYSTRKDDKGNTLIVNNLNGLYDKDNDKLKKLINKSPEKLLMYHHDPQTYQKLKLIMEQYGDEKNPLYKYYEETGNYLTKYSKKDNGPVIKKIKYYGNKLNAHLDITDDYPNSRNKVVKLSLKPYRFDVYLDNGVYKFVTVKNLDVIKKENYYEVNSKCYEEAKKLKKISNQAEFIASFYKNDLIKINGELYRVIGVNNDLLNRIEVNMIDITYREYLENMNDKRPPHIIKTIASKTQSIKKYSTDILGNLYEVKSKKHPQIIKKG

SEQ ID NO: 2025 - protein, 1367 aa, Streptococcus pyogenes
DKKYSIGLDIGTNSVGWAVITDEYKVPSKKFKVLGNTDRHSIKKNLIGALLFDSGETAEATRLKRTARRRYTRRKNRICYLQEIFSNEMAKVDDSFFHRLEESFLVEEDKKHERHPIFGNIVDEVAYHEKYPTIYHLRKKLVDSTDKADLRLIYLALAHMIKFRGHFLIEGDLNPDNSDVDKLFIQLVQTYNQLFEENPINASGVDAKAILSARLSKSRRLENLIAQLPGEKKNGLFGNLIALSLGLTPNFKSNFDLAEDAKLQLSKDTYDDDLDNLLAQIGDQYADLFLAAKNLSDAILLSDILRVNTEITKAPLSASMIKRYDEHHQDLTLLKALVRQQLPEKYKEIFFDQSKNGYAGYIDGGASQEEFYKFIKPILEKMDGTEELLVKLNREDLLRKQRTFDNGSIPHQIHLGELHAILRRQEDFYPFLKDNREKIEKILTFRIPYYVGPLARGNSRFAWMTRKSEETITPWNFEEVVDKGASAQSFIERMTNFDKNLPNEKVLPKHSLLYEYFTVYNELTKVKYVTEGMRKPAFLSGEQKKAIVDLLFKTNRKVTVKQLKEDYFKKIECFDSVEISGVEDRFNASLGTYHDLLKIIKDKDFLDNEENEDILEDIVLTLTLFEDREMIEERLKTYAHLFDDKVMKQLKRRRYTGWGRLSRKLINGIRDKQSGKTILDFLKSDGFANRNFMQLIHDDSLTFKEDIQKAQVSGQGDSLHEHIANLAGSPAIKKGILQTVKVVDELVKVMGRHKPENIVIEMARENQTTQKGQKNSRERMKRIEEGIKELGSQILKEHPVENTQLQNEKLYLYYLQNGRDMYVDQELDINRLSDYDVDHIVPQSFLKDDSIDNKVLTRSDKNRGKSDNVPSEEVVKKMKNYWRQLLNAKLITQRKFDNLTKAERGGLSELDKAGFIKRQLVETRQITKHVAQILDSRMNTKYDENDKLIREVKVITLKSKLVSDFRKDFQFYKVREINNYHHAHDAYLNAVVGTALIKKYPKLESEFVYGDYKVYDVRKMIAKSEQEIGKATAKYFFYSNIMNFFKTEITLANGEIRKRPLIETNGETGEIVWDKGRDFATVRKVLSMPQVNIVKKTEVQTGGFSKESILPKRNSDKLIARKKDWDPKKYGGFDSPTVAYSVLVVAKVEKGKSKKLKSVKELLGITIMERSSFEKNPIDFLEAKGYKEVKKDLIIKLPKYSLFELENGRKRMLASAGELQKGNELALPSKYVNFLYLASHYEKLKGSPEDNEQKQLFVEQHKHYLDEIIEQISEFSKRVILADANLDKVLSAYNKHRDKPIREQAENIIHLFTLTNLGAPAAFKYFDTTIDRKRYTSTKEVLDATLIHQSITGLYETRIDLSQLGGD

SEQ ID NO: 2026 - protein, 1367 aa, Streptococcus pyogenes
DKKYSIGLAIGTNSVGWAVITDEYKVPSKKFKVLGNTDRHSIKKNLIGALLFDSGETAEATRLKRTARRRYTRRKNRICYLQEIFSNEMAKVDDSFFHRLEESFLVEEDKKHERHPIFGNIVDEVAYHEKYPTIYHLRKKLVDSTDKADLRLIYLALAHMIKFRGHFLIEGDLNPDNSDVDKLFIQLVQTYNQLFEENPINASGVDAKAILSARLSKSRRLENLIAQLPGEKKNGLFGNLIALSLGLTPNFKSNFDLAEDAKLQLSKDTYDDDLDNLLAQIGDQYADLFLAAKNLSDAILLSDILRVNTEITKAPLSASMIKRYDEHHQDLTLLKALVRQQLPEKYKEIFFDQSKNGYAGYIDGGASQEEFYKFIKPILEKMDGTEELLVKLNREDLLRKQRTFDNGSIPHQIHLGELHAILRRQEDFYPFLKDNREKIEKILTFRIPYYVGPLARGNSRFAWMTRKSEETITPWNFEEVVDKGASAQSFIERMTNFDKNLPNEKVLPKHSLLYEYFTVYNELTKVKYVTEGMRKPAFLSGEQKKAIVDLLFKTNRKVTVKQLKEDYFKKIECFDSVEISGVEDRFNASLGTYHDLLKIIKDKDFLDNEENEDILEDIVLTLTLFEDREMIEERLKTYAHLFDDKVMKQLKRRRYTGWGRLSRKLINGIRDKQSGKTILDFLKSDGFANRNFMQLIHDDSLTFKEDIQKAQVSGQGDSLHEHIANLAGSPAIKKGILQTVKVVDELVKVMGRHKPENIVIEMARENQTTQKGQKNSRERMKRIEEGIKELGSQILKEHPVENTQLQNEKLYLYYLQNGRDMYVDQELDINRLSDYDVDHIVPQSFLKDDSIDNKVLTRSDKNRGKSDNVPSEEVVKKMKNYWRQLLNAKLITQRKFDNLTKAERGGLSELDKAGFIKRQLVETRQITKHVAQILDSRMNTKYDENDKLIREVKVITLKSKLVSDFRKDFQFYKVREINNYHHAHDAYLNAVVGTALIKKYPKLESEFVYGDYKVYDVRKMIAKSEQEIGKATAKYFFYSNIMNFFKTEITLANGEIRKRPLIETNGETGEIVWDKGRDFATVRKVLSMPQVNIVKKTEVQTGGFSKESILPKRNSDKLIARKKDWDPKKYGGFDSPTVAYSVLVVAKVEKGKSKKLKSVKELLGITIMERSSFEKNPIDFLEAKGYKEVKKDLIIKLPKYSLFELENGRKRMLASAGELQKGNELALPSKYVNFLYLASHYEKLKGSPEDNEQKQLFVEQHKHYLDEIIEQISEFSKRVILADANLDKVLSAYNKHRDKPIREQAENIIHLFTLTNLGAPAAFKYFDTTIDRKRYTSTKEVLDATLIHQSITGLYETRIDLSQLGGD

SEQ ID NO: 2027 - protein, 1368 aa, Streptococcus pyogenes
MDKKYSIGLDIGTNSVGWAVITDEYKVPSKKFKVLGNTDRHSIKKNLIGALLFDSGETAEATRLKRTARRRYTRRKNRICYLQEIFSNEMAKVDDSFFHRLEESFLVEEDKKHERHPIFGNIVDEVAYHEKYPTIYHLRKKLVDSTDKADLRLIYLALAHMIKFRGHFLIEGDLNPDNSDVDKLFIQLVQTYNQLFEENPINASGVDAKAILSARLSKSRRLENLIAQLPGEKKNGLFGNLIALSLGLTPNFKSNFDLAEDAKLQLSKDTYDDDLDNLLAQIGDQYADLFLAAKNLSDAILLSDILRVNTEITKAPLSASMIKRYDEHHQDLTLLKALVRQQLPEKYKEIFFDQSKNGYAGYIDGGASQEEFYKFIKPILEKMDGTEELLVKLNREDLLRKQRTFDNGSIPHQIHLGELHAILRRQEDFYPFLKDNREKIEKILTFRIPYYVGPLARGNSRFAWMTRKSEETITPWNFEEVVDKGASAQSFIERMTNFDKNLPNEKVLPKHSLLYEYFTVYNELTKVKYVTEGMRKPAFLSGEQKKAIVDLLFKTNRKVTVKQLKEDYFKKIECFDSVEISGVEDRFNASLGTYHDLLKIIKDKDFLDNEENEDILEDIVLTLTLFEDREMIEERLKTYAHLFDDKVMKQLKRRRYTGWGRLSRKLINGIRDKQSGKTILDFLKSDGFANRNFMQLIHDDSLTFKEDIQKAQVSGQGDSLHEHIANLAGSPAIKKGILQTVKVVDELVKVMGRHKPENIVIEMARENQTTQKGQKNSRERMKRIEEGIKELGSQILKEHPVENTQLQNEKLYLYYLQNGRDMYVDQELDINRLSDYDVDHIVPQSFLKDDSIDNKVLTRSDKNRGKSDNVPSEEVVKKMKNYWRQLLNAKLITQRKFDNLTKAERGGLSELDKAGFIKRQLVETRQITKHVAQILDSRMNTKYDENDKLIREVKVITLKSKLVSDFRKDFQFYKVREINNYHHAHDAYLNAVVGTALIKKYPKLESEFVYGDYKVYDVRKMIAKSEQEIGKATAKYFFYSNIMNFFKTEITLANGEIRKRPLIETNGETGEIVWDKGRDFATVRKVLSMPQVNIVKKTEVQTGGFSKESILPKRNSDKLIARKKDWDPKKYGGFVSPTVAYSVLVVAKVEKGKSKKLKSVKELLGITIMERSSFEKNPIDFLEAKGYKEVKKDLIIKLPKYSLFELENGRKRMLASARELQKGNELALPSKYVNFLYLASHYEKLKGSPEDNEQKQLFVEQHKHYLDEIIEQISEFSKRVILADANLDKVLSAYNKHRDKPIREQAENIIHLFTLTNLGAPAAFKYFDTTIDRKEYRSTKEVLDATLIHQSITGLYETRIDLSQLGGD

SEQ ID NO: 2028 - protein, 1368 aa, Streptococcus pyogenes
MDKKYSIGLDIGTNSVGWAVITDEYKVPSKKFKVLGNTDRHSIKKNLIGALLFDSGETAEATRLKRTARRRYTRRKNRICYLQEIFSNEMAKVDDSFFHRLEESFLVEEDKKHERHPIFGNIVDEVAYHEKYPTIYHLRKKLVDSTDKADLRLIYLALAHMIKFRGHFLIEGDLNPDNSDVDKLFIQLVQTYNQLFEENPINASGVDAKAILSARLSKSRRLENLIAQLPGEKKNGLFGNLIALSLGLTPNFKSNFDLAEDAKLQLSKDTYDDDLDNLLAQIGDQYADLFLAAKNLSDAILLSDILRVNTEITKAPLSASMIKRYDEHHQDLTLLKALVRQQLPEKYKEIFFDQSKNGYAGYIDGGASQEEFYKFIKPILEKMDGTEELLVKLNREDLLRKQRTFDNGSIPHQIHLGELHAILRRQEDFYPFLKDNREKIEKILTFRIPYYVGPLARGNSRFAWMTRKSEETITPWNFEEVVDKGASAQSFIERMTNFDKNLPNEKVLPKHSLLYEYFTVYNELTKVKYVTEGMRKPAFLSGEQKKAIVDLLFKTNRKVTVKQLKEDYFKKIECFDSVEISGVEDRFNASLGTYHDLLKIIKDKDFLDNEENEDILEDIVLTLTLFEDREMIEERLKTYAHLFDDKVMKQLKRRRYTGWGRLSRKLINGIRDKQSGKTILDFLKSDGFANRNFMQLIHDDSLTFKEDIQKAQVSGQGDSLHEHIANLAGSPAIKKGILQTVKVVDELVKVMGRHKPENIVIEMARENQTTQKGQKNSRERMKRIEEGIKELGSQILKEHPVENTQLQNEKLYLYYLQNGRDMYVDQELDINRLSDYDVDHIVPQSFLKDDSIDNKVLTRSDKNRGKSDNVPSEEVVKKMKNYWRQLLNAKLITQRKFDNLTKAERGGLSELDKAGFIKRQLVETRQITKHVAQILDSRMNTKYDENDKLIREVKVITLKSKLVSDFRKDFQFYKVREINNYHHAHDAYLNAVVGTALIKKYPKLESEFVYGDYKVYDVRKMIAKSEQEIGKATAKYFFYSNIMNFFKTEITLANGEIRKRPLIETNGETGEIVWDKGRDFATVRKVLSMPQVNIVKKTEVQTGGFSKESILPKRNSDKLIARKKDWDPKKYGGFVSPTVAYSVLVVAKVEKGKSKKLKSVKELLGITIMERSSFEKNPIDFLEAKGYKEVKKDLIIKLPKYSLFELENGRKRMLASAGELQKGNELALPSKYVNFLYLASHYEKLKGSPEDNEQKQLFVEQHKHYLDEIIEQISEFSKRVILADANLDKVLSAYNKHRDKPIREQAENIIHLFTLTNLGAPAAFKYFDTTIDRKQYRSTKEVLDATLIHQSITGLYETRIDLSQLGGD

SEQ ID NO: 2029 - protein, 1368 aa, Streptococcus pyogenes
MDKKYSIGLDIGTNSVGWAVITDEYKVPSKKFKVLGNTDRHSIKKNLIGALLFDSGETAEATRLKRTARRRYTRRKNRICYLQEIFSNEMAKVDDSFFHRLEESFLVEEDKKHERHPIFGNIVDEVAYHEKYPTIYHLRKKLVDSTDKADLRLIYLALAHMIKFRGHFLIEGDLNPDNSDVDKLFIQLVQTYNQLFEENPINASGVDAKAILSARLSKSRRLENLIAQLPGEKKNGLFGNLIALSLGLTPNFKSNFDLAEDAKLQLSKDTYDDDLDNLLAQIGDQYADLFLAAKNLSDAILLSDILRVNTEITKAPLSASMIKRYDEHHQDLTLLKALVRQQLPEKYKEIFFDQSKNGYAGYIDGGASQEEFYKFIKPILEKMDGTEELLVKLNREDLLRKQRTFDNGSIPHQIHLGELHAILRRQEDFYPFLKDNREKIEKILTFRIPYYVGPLARGNSRFAWMTRKSEETITPWNFEEVVDKGASAQSFIERMTNFDKNLPNEKVLPKHSLLYEYFTVYNELTKVKYVTEGMRKPAFLSGEQKKAIVDLLFKTNRKVTVKQLKEDYFKKIECFDSVEISGVEDRFNASLGTYHDLLKIIKDKDFLDNEENEDILEDIVLTLTLFEDREMIEERLKTYAHLFDDKVMKQLKRRRYTGWGRLSRKLINGIRDKQSGKTILDFLKSDGFANRNFMQLIHDDSLTFKEDIQKAQVSGQGDSLHEHIANLAGSPAIKKGILQTVKVVDELVKVMGRHKPENIVIEMARENQTTQKGQKNSRERMKRIEEGIKELGSQILKEHPVENTQLQNEKLYLYYLQNGRDMYVDQELDINRLSDYDVDHIVPQSFLKDDSIDNKVLTRSDKNRGKSDNVPSEEVVKKMKNYWRQLLNAKLITQRKFDNLTKAERGGLSELDKAGFIKRQLVETRQITKHVAQILDSRMNTKYDENDKLIREVKVITLKSKLVSDFRKDFQFYKVREINNYHHAHDAYLNAVVGTALIKKYPKLESEFVYGDYKVYDVRKMIAKSEQEIGKATAKYFFYSNIMNFFKTEITLANGEIRKRPLIETNGETGEIVWDKGRDFATVRKVLSMPQVNIVKKTEVQTGGFSKESILPKRNSDKLIARKKDWDPKKYGGFESPTVAYSVLVVAKVEKGKSKKLKSVKELLGITIMERSSFEKNPIDFLEAKGYKEVKKDLIIKLPKYSLFELENGRKRMLASAGELQKGNELALPSKYVNFLYLASHYEKLKGSPEDNEQKQLFVEQHKHYLDEIIEQISEFSKRVILADANLDKVLSAYNKHRDKPIREQAENIIHLFTLTNLGAPAAFKYFDTTIDRKQYRSTKEVLDATLIHQSITGLYETRIDLSQLGGD

SEQ ID NO: 2030 - protein, 173 aa, Bacteriophage Mu
AKPAKRIKSAAAAYVPQNRDAVITDIKRIGDLQREASRLETEMNDAIAEITEKFAARIAPIKTDIETLSKGVQGWCEANRDELTNGGKVKTANLVTGDVSWRVRPPSVSIRGMDAVMETLERLGLQRFIRTKQEINKEAILLEPKAVAGVAGITVKSGIEDFSIIPFEQEAGI

SEQ ID NO: 2031 - protein, 174 aa, Enterobacteriaceae
MAKPAKRIKSAAAAYVPQNRDAVITDIKRIGDLQREASRLETEMNDAIAEITEKFAARIAPIKTDIETLSKGVQGWCEANRDELTNGGKVKTANLVTGDVSWRVRPPSVSIRGMDAVMETLERLGLQRFIRTKQEINKEAILLEPKAVAGVAGITVKSGIEDFSIIPFEQEAGI

SEQ ID NO: 2032 - protein, 174 aa, Escherichia coli
MAKPAKRIKSAAAAYVPQNRDAVITDIKRIGDLQREASRLETEMNDAIAEITEKFAARIAPLKTDIETLSKGVQGWCEANRDELTNGGKVKTANLVTGDVSWRVRPPSVSIRGMDAVMETLERLGLQRFIRTKQEINKEAILLEPKAVAGVAGITVKSGIEDFSIIPFEQEAGI

SEQ ID NO: 2033 - protein, 174 aa, Escherichia coli
MAKPAKRIKSAAAAYVPQNRDAVITDIKRIGDLQREASRLETEMNDAIAEITEKFAARIAPIKTDIETLSKGVQGWCEANRDELTNGGKVKTANLITGDVSWRVRPPSVSIRGMDAVMETLERLGLQRFIRTKQEINKEAILLEPKAVAGVAGITVKSGIEDFSIIPFEQEAGI

SEQ ID NO: 2034 - protein, 174 aa, Shigella sonnei
MAKPAKRIRNAAAAYVPQSRDAVVCDIRRIGDLQREAARLETEMNDAIAEITEKYASQIAPLKTSIETLSKGVQGWCEANRDELTNGGKVKTANLVTGDVSWRQRPPSVSIRGVDAVMETLERLGLQRFIRTKQEINKEAILLEPKAVAGVAGITVKSGIEDFSIIPFEQEAGI

SEQ ID NO: 2035 - protein, 174 aa, Enterobacteriaceae; identical to SEQ ID NO: 2031

SEQ ID NO: 2036 - protein, 174 aa, Escherichia virus Mu
MAKPAKRIKSAAAAYVPQNRDAVITDIKRIGDLQREASRLETEMNDAIAEITEKFAARIAPIKTDIETLSKGVQGWCEANRDELTNGGKVKTANLVTGDVSWRVRPPSVSIRGMDAVMETLERLGLQRFVRTKQEINKEAILLEPKAVAGVAGITVKSGIEDFSIIPFEQEAGI

SEQ ID NO: 2037 - protein, 174 aa, Escherichia coli; identical to SEQ ID NO: 2032

SEQ ID NO: 2038 - protein, 174 aa, Escherichia coli; identical to SEQ ID NO: 2033

SEQ ID NO: 2039 - protein, 174 aa, Escherichia coli
MAKPAKRIKNAAAAYVPQSRDAVVCDIRRIGDLQREAARLETEMNDAIAEITEKYASQIAPLKTSIETISKGVQGWCEANRDELTNGGKVKTANLVTGDVSWRQRPPSVSIRGVDAVMETLERLGLQRFIRTKQEINKEAILLEPKAVAGVAGITVKSGIEDFSIIPFEQEAGI

SEQ ID NO: 2040 - protein, 174 aa, Escherichia coli
MAKPAKRIKNAAAAYVPQSRDAVVCDIRRIGDLQREAARLETEMNDAIADITEKYASQIAPLKTSIETLSKGVQGWCEANRDELTNGGKVKTANLVTGDVSWRQRPPSVSIRGVDAVMETLERLGLQRFIRTKQEINKEAILLEPKAVAGVAGITVKSGIEDFSIIPFEQEAGI

SEQ ID NO: 2041 - protein, 174 aa, Escherichia coli
MAKSAKRIRNAAAAYVPQSRDAVVCDIRRIGNLQREAARLETEMNDAIAEITEKFAARIAPLKTDIETLSKGVQGWCEANRDELTNGGKVKTANLVTGDVSWRQRPPSVSIRGVDAVMETLERLGLQRFIRTKQEINREAILLEPKAVAGVAGITVKSGIEDFSIIPFEQDAGI

SEQ ID NO: 2042 - protein, 174 aa, Shigella sonnei
MAKPAKRIRNAAAAYVPQSRDAVVCDIRRIGDLQREAARLETEMNDAIAEITEKYASQIAPLKTSIETLSKGVQGWCEANRDELTNGGKVKTANLVTGDVSWRQRPPSVSIRGVDAVMETLERLGLQRFIRTKQEINKEAILLEPKAVAGVAGITVKSGIEDFSIIPFEQDAGI

SEQ ID NO: 2043 - protein, 174 aa, Escherichia coli
MAKPAKRIKNAAAAYVPQSRDAVVCDIRRIGDLQREAARLETEMNDAIAEITEKYASQIAPLKTSIETLSKGVQGWCEANRDELTNGGKVKTANLVTGDVSWRLRPPSVSIRGVDAVMETLERLGLQRFICTKQEINKEAILLEPKVVAGVAGITVKSGIEDFSIIPFEQEAGI

SEQ ID NO: 2044 - protein, 174 aa, Escherichia coli
MAKPVKRIRNAAAAYVPQSRDAVVCDIRRIGDLQREAARLETEMNDAIAEITEKYASQIAPLKTSIETLSKGIQGWCEANRDELTNGGKVKTANLVTGDVSWRQRPPSVSIRGVDAVMETLERLGLQRFIRTKQEINKEAILLEPKAVAGVAGITVKSGIEDFSIIPFEQEAGI

SEQ ID NO: 2045 - protein, 174 aa, Escherichia coli
MAKPAKRIRNAAAAYVPQSRDAVVCDIRWIGDLQREAVRLETEMNDAIAEITEKYASRIAPLKTRIETLSKGVQGWCEANRDELTNGGKVKTANLVTGDVSWRQRPPSVSIRGVDAVMETLERLGLQRFIRTKQEINKEAILLEPKAVAGVAGITVKSGIEDFSIIPFEQEAGI

SEQ ID NO: 2046 - protein, 174 aa, Escherichia coli
MAKSAKRIRNAAATYVPQSRDAVVCDIRRIGDLQREAARLETEMNDAIAEITEKYASQIAPLKTSIETLSKGIQGWCEANRDELTNGGKVKTANLVTGDVSWRQRPPSVSIRGVDAVMETLERLGLQRFIRTKQEINKEAILLEPKAVAGVAGITVKSGIEDFSIIPFEQEAGI

SEQ ID NO: 2047 - protein, 174 aa, Salmonella enterica
MAKSAKRIKSAAATYVPQSRDAVVCDIRRIGDLQREAARLETEMNDAIAEITEKYASQIAPLKTSIETLSKGVQGWCEANRDELTNGGKVKSANLVTGDVQWRQRPPSVSIRGVDAVMETLERLGLQRFIRTKQEINKEAILLEPKAVAGVAGITVKSGIEDFSIIPFEQEAGI

SEQ ID NO: 2048 - protein, 174 aa, Shigella sonnei
MAKSAKRIRNAAAAYVPQSRDAVVCDIRRIGNLQREAARLETEMNDAIAEITEKYASQIAPLKTSIETLSKGVQGWCEANRDELTNGGKVKTANLVTGDVSWRQRPPSVSIRGVDAVMETLERLGLQRFIRTKQEINKEAILLEPKAVAGVAGITVKSGIEDFSIIPFEQDAGI

SEQ ID NO: 2049 - protein, 165 aa, Shigella flexneri
MVVSAIASTPHDAVVCDIRRIGDLQREAARLETEMNDAIAEITEKDASQIAPLKTSIETLSKGVQGWCEANRDELTNGGKVKTANLVTGDVSWRQRPPSVSIRGVDAVMETLERLGLQRFIRTKQEINKEAILLEPKAVAGVAGITVKSGIEDFSIIPFEQEAGI

SEQ ID NO: 2050 - protein, 174 aa, Kluyvera georgiana
MVSKPKRIKAAAANYVSQSRDAVITDIRKIGDLQREATRLESAMNDEIAVITEKYAGLIKPLKADVEMLSKGVQGWCEANRDDLTSNGKVKTANLVTGDIQWRIRPPSVSVRGPDAVMETLTRLGLSRFIRTKQEINKEAILNEPLAVAGVAGITVKSGIEDFSIIPFEQTADI

SEQ ID NO: 2051 - protein, 174 aa, Edwardsiella tarda
MASKPKRIKSAAANYVSQSRDAVIIDIRKIGDLQREATRLESAMNDEIAVITEKYAGLIKPLKADVEMLSKGVQGWCEANRDELTCNGKVKTANLVTGDIQWRIRPPSVSVRGPDSVMETLLRLGLSRFIRTKQEINKEAILNEPLAVAGVAGITVKTGVEDFSIIPFEQTADI

SEQ ID NO: 2052 - protein, 174 aa, Citrobacter freundii
MVSKPKRIKAAAANYVSQSKEAVIADIRKIGDLQREATRLESAMNDEIAVITEKYAGLIKPLKTDVEILSKGVQGWCEANRDELTSNGKVKTANLVTGDIQWRIRPPSVAVRGPDAVMETLLRLGLSRFIRTKQEINKEAILNEPLAVAGVAGITVKSGVEDFSIIPFEQTADI

SEQ ID NO: 2053 - protein, 174 aa, Salmonella enterica
MASKPKRIKAAAALYVSQSREDVVRDIRMIGDFQREIVRLETEMNDQIAAVTLKYADKIKPLQEQLKTLSEGVQNWCEANRSDLTNGGKVKTANLVTGDVQWRVRPPSVTVRGVDSVMETLRRLGLSRFIRIKEEINKEAILNEPGAVAGVAGITVKSGVEDFSIIPFEQSATN

SEQ ID NO: 2054 - protein, 172 aa, Pasteurella multocida
MAKKATRIKTTAQVYVPQSREDVASDIKTIGDLNREITRLETEMNDKIAEITESYKGQFSPIQERIKNLSTGVQFWAEANRDQITNGGKTKTANLITGEVSWRVRNPSVKITGVDSVLQNLKIHGLTKFIRVKEEINKEAILNEKHEVAGIAGIKVVSGVEDFVITPFEQEI

SEQ ID NO: 2055 - protein, 173 aa, Aggregatibacter actinomycetemcomitans
MAKSATRVKATAQIYVPQTREDAAGDIKTIGDLNREVARLEAEMNDKIAAITEDYKDKFAPLQERIKTLSNGVQYWSEANRDQITNGGKTKTANLVTGEVSWRVRNPSVKVTGVDSVLQNLRIHGLERFIRTKEEINKEAILNEKSAVAGIAGIKVITGVEDFVITPFEQEAA

SEQ ID NO: 2056 - protein, 173 aa, Nitrosomonas halophila
MARNAARLKTKSIAYVPQSRDDAAADIRKIGDLQRQLTRTSTEMNDAIAAITQNFQPRMDAIKEQINLLQAGVQGYCEAHRHALTDNGRVKTANLITGEVQWRQRPPSVSIRGQQVVLETLRRLGLERFIRTKEEVNKEAILNEPDEVRGVAGLNVITGVEDFVITPFEQEQP

SEQ ID NO: 2057 - protein, 172 aa, Wohlfahrtiimonas larvae
MAKKRIKAAATVYVPQSKEEVQNDIREIGDISRKNERLETEMNDRIAEITNEYAPKFEVNKVRLELLTKGVQSWCEANRDDLTNSGKVKSANLVTGKVEWRQRPPSISVKGMDAVIEWLQDSKYQRFLRTKVEVNKEAMLNEPEDAKTIPGITIKSGIEDFAITPFEQEAGV

SEQ ID NO: 2058 - protein, 174 aa, Escherichia virus Mu; identical to SEQ ID NO: 2036

1. A method of editing a polynucleotide encoding a Proprotein Convertase Subtilisin/Kexin Type 9 (PCSK9) protein, the method comprising contacting the PCSK9-encoding polynucleotide with:
(i) a fusion protein comprising: (a) a guide nucleotide sequence-programmable DNA binding protein domain; and (b) a cytosine deaminase domain; and
(ii) a guide nucleotide sequence targeting the fusion protein of (i) to a target cytosine (C) base in the PCSK9-encoding polynucleotide,
wherein the contacting results in deamination of the target C base by the fusion protein, resulting in a cytosine (C) to thymine (T) change in the PCSK9-encoding polynucleotide.

2. The method of claim 1, wherein the guide nucleotide sequence-programmable DNA binding protein is a nickase.

3. The method of claim 1, wherein the guide nucleotide sequence-programmable DNA binding protein domain is a Cas9 nickase.

4. The method of claim 3, wherein the Cas9 nickase comprises a mutation corresponding to a D10A mutation or an H840A mutation in SEQ ID NO: 1.

5. (canceled)

6. The method of claim 1, wherein the guide nucleotide sequence-programmable DNA binding protein domain is selected from the group consisting of: nuclease inactive Cas9 (dCas9) domains, nuclease inactive Cpf1 domains, nuclease inactive Argonaute domains, and variants thereof.

7-13. (canceled)

14. The method of claim 1, wherein the cytosine deaminase domain comprises an apolipoprotein B mRNA-editing complex (APOBEC) family deaminase.

15-16. (canceled)

17. The method of claim 1, wherein the fusion protein of (i) further comprises a Gam protein.

18. (canceled)

19. The method of claim 1, wherein the fusion protein of (i) further comprises a uracil glycosylase inhibitor (UGI) domain.

20-29. (canceled)

30. The method of claim 1, wherein the polynucleotide encoding the PCSK9 protein comprises a coding strand and a complementary strand.

31. (canceled)

32. The method of claim 1, wherein the C to T change in the PCSK9-encoding polynucleotide leads to a mutation in the PCSK9 protein.

33. (canceled)

34. The method of claim 32, wherein the mutation in the PCSK9 protein is a loss-of-function mutation.

35. The method of claim 34, wherein the mutation is selected from the mutations listed in Table 3.

36. The method of claim 35, wherein the guide nucleotide sequence comprises a guide sequence listed in Table 3.

37. The method of claim 34, wherein the loss-of-function mutation is a premature stop codon that leads to a truncated or non-functional PCSK9 protein.

38-44. (canceled)

45. The method of claim 37, wherein the guide nucleotide sequence comprises a guide sequence listed in Table 6.

46-47. (canceled)

48. The method of claim 37, wherein the premature stop codon is introduced after a structurally destabilizing mutation, wherein the destabilizing mutation is selected from the group consisting of P530S/L, P581S/L, and P618S/L, and wherein the premature stop codon is selected from the group consisting of Q531X, R582X, and Q619X, wherein X is a stop codon.

49-51. (canceled)

52. The method of claim 34, wherein the mutation destabilizes PCSK9 protein folding.

53. The method of claim 52, wherein the mutation is selected from the mutations listed in Table 4.

54. The method of claim 53, wherein the guide nucleotide sequence comprises a guide sequence listed in Table 4.

55. The method of claim 1, wherein the C to T change occurs at a splicing site of the PCSK9-encoding polynucleotide.

56-59. (canceled)

60. The method of claim 55, wherein the C to T change prevents PCSK9 mRNA maturation or abrogates PCSK9 expression.

61. The method of claim 60, wherein the guide nucleotide sequence comprises a guide sequence listed in Table 8.

62-69. (canceled)

70. The method of claim 1, wherein the guide nucleotide sequence is RNA (gRNA).

71. (canceled)

72. A method of editing a polynucleotide encoding an Apolipoprotein C3 (APOC3) protein, the method comprising contacting the APOC3-encoding polynucleotide with:
(i) a fusion protein comprising: (a) a guide nucleotide sequence-programmable DNA binding protein domain; and (b) a cytosine deaminase domain; and
(ii) a guide nucleotide sequence targeting the fusion protein of (i) to a target cytosine (C) base in the APOC3-encoding polynucleotide,
wherein the contacting results in deamination of the target C base by the fusion protein, resulting in a cytosine (C) to thymine (T) change in the APOC3-encoding polynucleotide.

73-91. (canceled)

92. A method of editing a polynucleotide encoding a Low-Density Lipoprotein Receptor (LDL-R) protein, the method comprising contacting the LDL-R-encoding polynucleotide with:
(i) a fusion protein comprising: (a) a guide nucleotide sequence-programmable DNA binding protein domain; and (b) a cytosine deaminase domain; and
(ii) a guide nucleotide sequence targeting the fusion protein of (i) to a target cytosine (C) base in the LDL-R-encoding polynucleotide,
wherein the contacting results in deamination of the target C base by the fusion protein, resulting in a cytosine (C) to thymine (T) change in the LDLR-encoding polynucleotide.

93. (canceled)

94. A method of editing a polynucleotide encoding an Inducible Degrader of the LDL receptor (IDOL) protein, the method comprising contacting the IDOL-encoding polynucleotide with:
(i) a fusion protein comprising: (a) a guide nucleotide sequence-programmable DNA binding protein domain; and (b) a cytosine deaminase domain; and
(ii) a guide nucleotide sequence targeting the fusion protein of (i) to a target C base in the IDOL-encoding polynucleotide,
wherein the contacting results in deamination of the target C base by the fusion protein, resulting in a cytosine (C) to thymine (T) change in the IDOL-encoding polynucleotide.

95-101. (canceled)

102. A method of editing a polynucleotide encoding a Proprotein Convertase Subtilisin/Kexin Type 9 (PCSK9) protein, the method comprising contacting the PCSK9-encoding polynucleotide with a fusion protein comprising: (a) a programmable DNA binding protein domain; and (b) a deaminase domain,
wherein the contacting results in deamination of the target base by the fusion protein, resulting in base change in the PCSK9-encoding polynucleotide.

103-109. (canceled)

110. A composition comprising:
(i) a fusion protein comprising: (a) a guide nucleotide sequence-programmable DNA binding protein domain; and (b) a cytosine deaminase domain; and
(ii) a guide nucleotide sequence targeting the fusion protein of (i) to a polynucleotide encoding a Proprotein Convertase subtilisin/Kexin Type 9 (PCSK9) protein.

111-123. (canceled)

124. A method of boosting LDL receptor-mediated clearance of LDL cholesterol, the method comprising administering to a subject in need thereof an therapeutically effective amount of the composition of claim 110.

125. A method of reducing circulating cholesterol level in a subject, the method comprising administering to a subject in need thereof an therapeutically effective amount of the composition of claim 110.

126-128. (canceled)
